(19) United States
(12) Patent Application Publication
(10) Pub. No.: US 2006/0084066 A1
(43) Pub. Date: Apr. 20, 2006

(54) Surrogate markers of neuropathic pain

(76) Inventors: Dinah W. Y. Sah, Boston, MA (US); Richard Cate, Cohasset, MA (US); Christian W. Ehrenfels, Chelmsford, MA (US); Suzanne Szak, Arlington, MA (US); Rajasekhar Bandaru, Watertown, MA (US)

Correspondence Address: FINNEGAN, HENDERSON, FARABOW, GARRETT & DUNNER;LLP, 901 NEW YORK AVENUE, NW, WASHINGTON, DC, 20001-4413, US

(21) Appl. No.: 10/784,004

(22) Filed: Feb. 20, 2004

(51) Int. Cl. C12Q 1/68; G01N 33/567; G01N 33/53

(52) U.S. Cl. 435/6; 435/7.2

(57) ABSTRACT

The disclosure provides methods and compositions for the evaluation of neuropathic pain and neurotrophic or other activity of a drug or drug candidate. In the disclosed methods, expression of certain gene(s) in tissue extracts from skin biopsies serves as a proxy of a relevant endpoint.

### FIELD OF THE INVENTION

[0001] The invention is in the fields of neurology and pharmacology. The invention generally relates to methods of evaluating neuropathic pain and to methods of evaluating biological activity of drugs or drug candidates for treating neuropathies.

### BACKGROUND OF THE INVENTION

[0002] Painful neuropathies are characterized by spontaneous and/or abnormal stimulus-evoked pain such as allodynia or hyperalgesia. Symptoms of neuropathic pain often include spontaneous cramping, burning, or shooting pain, or pain caused by normally innocuous stimuli. Neuropathic pain has a neurogenic origin, i.e., it is initiated or caused by a primary lesion or dysfunction in the peripheral or central nervous system (see, e.g., Merskey and Bogdik (1994) Classification of Chronic Pain: Descriptions of Chronic Pain Syndromes and Definitions of Pain Terms, 2nd ed., Seattle: IASP Press). Neuropathic pain can occur as a result of nerve damage due to infectious agents (e.g., herpesviruses), metabolic diseases (e.g., diabetes), neurodegenerative diseases (e.g., multiple sclerosis), nerve injury (e.g., amputation or cancer-induced nerve compression), etc. Current pharmacologic and nonpharmacologic therapies for chronic neuropathic pain provide only partial relief and the outcomes vary widely in individual patients.

[0003] Conditions affecting the peripheral nervous system create pathophysiologic changes such as loss of small sensory fibers and/or demyelination. Such changes can be histologically observed in the skin. Indeed, histological evaluation of skin biopsies has become an accepted method for assessing peripheral nerve status in patients with neuropathic pain or peripheral neuropathy (Griffin et al. (2001) Curr. Opin. Neurol., 14:655-659). This approach allows one to evaluate the progression of nerve damage in disease and regeneration/re-innervation with treatment. Counting criteria include epidermal nerve fiber density, the number of fibers crossing the dermal-epidermal junction, etc. Skin biopsies can be performed in multiple sites over time, so that a spatiotemporal profile of epidermal innervation can be assessed. However, histological analysis of skin biopsies is a laborious and time-consuming procedure.

[0004] Therefore, there exists a need in the art to develop new methods for treatment and assessment of neuropathic pain and peripheral neuropathy.

### SUMMARY OF THE INVENTION

[0005] The present invention results from the realization that skin biopsy samples can be nonhistologically evaluated for expression of gene(s) that reflect the neuropathic pain status (“surrogate markers of neuropathic pain”). The expression of such genes can be measured in skin biopsy homogenates in a rapid and quantitative manner. If the expression of the gene(s) in skin punch biopsy samples correlates with the beneficial effect of the drug or drug candidate on neuropathic pain or peripheral neuropathy, then the read-out represents a surrogate marker of drug activity associated with the reduction in neuropathic pain and/or peripheral neuropathy (“surrogate marker of neurotrophic activity”). Furthermore, gene expression in skin punch biopsy samples can be used as a read-out of in vivo biological activity of a drug or drug candidate regardless of the neuropathic pain status (“biomarker of in vivo biological activity of a neurotrophic agent” or “biomarker of a neurotrophic agent” for short).

[0006] In one aspect, the invention provides methods of identifying surrogate markers of neuropathic pain. The methods of identifying a surrogate marker of neuropathic pain include:
[0007] (a) obtaining a first skin biopsy sample under conditions of neuropathic pain;
[0008] (b) obtaining a second skin biopsy sample under conditions of substantially no neuropathic pain;
[0009] (c) preparing tissue extracts from the first and the second samples; and
[0010] (d) determining an amount of at least one nucleic acid or protein in the tissue extracts.
   A difference between the amount of the nucleic acid or the protein in the first sample and the amount of the same nucleic acid or protein in the second sample indicates that the nucleic acid or the protein is a surrogate marker of neuropathic pain.

[0011] In another aspect, the invention provides methods of evaluating the level of neuropathic pain using such surrogate markers. The methods of evaluating the level of neuropathic pain using surrogate markers of neuropathic pain include:
[0012] (a) obtaining a first skin biopsy sample under conditions of neuropathic pain;
[0013] (b) obtaining a second skin biopsy sample under conditions of substantially no neuropathic pain;
[0014] (c) preparing tissue extracts from the first and the second samples; and
[0015] (d) determining an amount of at least one nucleic acid or protein in the tissues, the nucleic acid or the protein being a surrogate marker of neuropathic pain.
   A difference between the amount of the nucleic acid or the protein in the first sample and the amount of the same nucleic acid or protein in the second sample indicates the level of neuropathic pain.

[0016] In another aspect, the invention provides methods of evaluating neurotrophic activity of a compound or composition, for example, in evaluating the effect of a compound of composition on the level of neuropathic pain. The methods include:
[0017] (a) administering the compound or composition to the mammal having neuropathic pain;
[0018] (b) obtaining at least one skin biopsy sample from the mammal;
[0019] (c) preparing a tissue extract from the skin biopsy sample; and
[0020] (d) determining an amount of at least of one surrogate marker of neuropathic pain that is nucleic acid or protein in the tissue extract.
   A difference in the amount of the nucleic acid or protein determined in step (d) and the amount of the same nucleic acid or protein expressed in the absence of the compound or composition indicates the level of efficacy of the compound or composition on neuropathic pain.

[0021] In another aspect, the invention provides methods of identifying biomarkers of in vivo biological activity of a neurotrophic agent and methods of evaluating in vivo biological activity of a neurotrophic agent using such biomarkers. The methods of identifying biomarkers of in vivo biological activity of a neurotrophic agent include:
[0022] (a) administering the agent to a mammal;
[0023] (b) obtaining at least one skin biopsy sample from the mammal;
[0024] (c) preparing a tissue extract from the skin biopsy sample; and
[0025] (d) determining an amount of at least one nucleic acid or protein in the tissue extract.
   A difference in the amount of the nucleic acid or protein determined in step (d) and the amount of the same nucleic acid or protein expressed in the absence of the agent indicates that the nucleic acid or the protein is a biomarker of in vivo biological activity of the agent.

[0026] In another aspect, the invention provides methods of evaluating in vivo biological activity of a neurotrophic agent using biomarkers of in vivo biological activity of such an agent. The methods of evaluating in vivo biological activity of a neurotrophic agent include:
[0027] (a) administering the agent to a mammal;
[0028] (b) obtaining at least one skin biopsy sample from the mammal;
[0029] (c) preparing a tissue extract from the skin biopsy sample; and
[0030] (d) determining an amount of at least one nucleic acid or protein in the tissue extract.
   A difference in the amount of the nucleic acid or protein determined in step (d) and the amount of the same nucleic acid or protein expressed in the absence of the agent indicates that the agent is biologically active.

[0031] In illustrative embodiments, the neurotrophic agent being evaluated is artemin (also known as neublastin or enovin), a member of the glial-cell-line-derived neurotrophic factor (GDNF) family.

[0032] Exemplary nucleotide and/or amino acid sequences of human and rat surrogate markers of neuropathic pain, surrogated markers of neurotrophic activity and biomarkers of in vivo biological activity of neurotrophic agents are also provided (see Table 1).

TABLE 1

| | | Preferred | | | | |
|---|---|---|---|---|---|---|
| Group No. | SEQ ID NOs: | SEQ ID NOs: | Category* | Type | Species | Table No. |
| I | 1-308 | 1-42 | SMP | DNA | Rat | Table 2 |
| II | 309-470 | 309-333 | SMP | Protein | Rat | Table 3 |
| III | 471-630 | 471-493 | SMP | DNA | Human | Table 4 |
| IV | 631-790 | 631-653 | SMP | Protein | Human | Table 5 |
| V | 791-897 | 791-814 | SMN | DNA | Rat | Table 6 |
| VI | 898-962 | 898-914 | SMN | Protein | Rat | Table 7 |
| VII | 963-1038 | 963-979 | SMN | DNA | Human | Table 8 |
| VIII | 1039-1114 | 1039-1055 | SMN | Protein | Human | Table 9 |
| IX | 1115-1163 | 1115-1120 | BMN | DNA | Rat | Table 10 |
| X | 1164-1178 | 1164-1166 | BMN | Protein | Rat | Table 11 |
| XI | 1179-1207 | 1179-1182 | BMN | DNA | Human | Table 12 |
| XII | 1208-1236 | 1208-1211 | BMN | Protein | Human | Table 13 |

*SMP - surrogate marker of neuropathic pain; SMN - surrogate marker of neurotrophic activity; BMN - biomarker of a neurotrophic agent.

[0033] Various embodiments of the invention are set forth in the following description or will be understood from the description.

### BRIEF DESCRIPTION OF THE FIGURES

[0034] FIG. 1 shows results of a TaqMan™ analysis of gene expression of rc_AA818804_at (SEQ ID NO:18 and SEQ ID NO:799) in the L4 dermatome of rats subjected to spinal nerve ligation injury (SNL) and treament with artemin. The gene is expressed at a low level before injury, at a higher level following injury, and at a near-normal level after injury and treatment with artemin.

[0035] FIG. 2 shows results of a TaqMan™ analysis of gene expression of X14812_at (SEQ ID NO:37 and SEQ ID NO:813) in the L4 dermatome of rats subjected to SNL and treament with artemin. The gene is expressed at a low level before injury, at a higher level following injury, and at a near-normal level after injury and treatment with artemin.

[0036] FIG. 3 shows results of a TaqMan™ analysis of gene expression of rc_AA818120_at (SEQ ID NO:31 and SEQ ID NO:808) in the L4 dermatome of rats subjected to SNL and treament with artemin. The gene is expressed at a low level before injury, at a higher level following injury, and at a near-normal level after injury and treatment with artemin.

[0037] FIG. 4 shows results of a TaqMan™ analysis of gene expression of rc_AA946094_at (SEQ ID NO:2 and SEQ ID NO:791) in the L4 dermatome of rats subjected to SNL and treament with artemin. The gene is expressed at a low level before injury, at a higher level following injury, and at a near-normal level after injury and treatment with artemin.

[0038] FIG. 5 shows results of a TaqMan™ analysis of gene expression of X07314cds_at (SEQ ID NO:11 and SEQ ID NO:796) in the L4 dermatome of rats subjected to SNL and treament with artemin. The gene is expressed at a low level before injury, at a higher level following injury, and at a near-normal level after injury and treatment with artemin.

[0039] FIG. 6 shows results of a TaqMan™ analysis of expression of gene M27151_at (SEQ ID NO:22 and SEQ ID NO:801) in the L4 dermatome of rats subjected to SNL and treament with artemin. The gene is expressed at a low level before injury, at a higher level following injury, and at a near-normal level after injury and treatment with artemin.

[0040] FIG. 7 shows results of an Affymatrix analysis of expression of gene rc_AI072712_at (SEQ ID NO:1118) in the L4 dermatome of rats subjected to SNL and treament with artemin. Regardsless of injury state, this gene is expressed at a relatively high level in the vehicle-treated samples, and at a much reduced level following treatment with artemin.

### DETAILED DESCRIPTION OF THE INVENTION

[0041] In the experiments leading to the present invention, rats were subjected to unilateral spinal nerve ligation (SNL) to induce unilateral neuropathic pain. Following SNL, some rats were systemically administered artemin, a neurotrophic factor shown to reduce neuropathic pain (Gardell et al. (2003) Nature Med., 9(11):1383-1389). The induced neuropathic pain was assessed using behavioral tests. Skin samples were then obtained bilaterally and tissue extracts were prepared. RNA from these tissue extracts was subjected to Affymetrix GeneChip™ expression analysis to determine gene expression profiles in various samples.

[0042] The heterogeneity of tissues usually makes it difficult to detect small changes in transcription in tissue samples, especially if the changes are restricted to small subpopulations of cells or are a result of indirect effects. Despite this difficulty, the present invention is based, in part, on the discovery and demonstration that detectable changes in gene expression in skin biopsy homogenates reflect the neuropathic pain status.

[0043] In particular, the methods of the invention may be used to identify genes whose expression levels correlate with neuropathic pain (surrogate markers of neuropathic pain). The invention may be also used to identify a subset of these genes whose expression levels are at least partially normalized by the artemin treatment (surrogate markers of neurotrophic activity). The invention may be used to identify an additional set of genes whose expression levels correlate with the presence of biologically active artemin regardless of the neuropathic pain status (biomarkers of a neurotrophic agent).

Surrogate Markers of Neuropathic Pain

[0044] The invention provides a method of identifying a surrogate marker of neuropathic pain in a mammal, comprising:
[0045] (a) obtaining a first skin biopsy sample under conditions of neuropathic pain;
[0046] (b) obtaining a second skin biopsy sample under conditions of substantially no neuropathic pain;
[0047] (c) preparing tissue extracts from the first and the second samples; and
[0048] (d) determining an amount of at least one nucleic acid or protein in the tissue extracts;
   wherein a difference between the amount of the nucleic acid or the protein in the first sample and the amount of the same nucleic acid or protein in the second sample indicates that the nucleic acid or the protein is a surrogate marker of neuropathic pain. In some embodiments, the amount of the nucleic acid or the protein in the first sample will differ from the amount of the same nucleic acid or protein in the second sample by, for example, 2, 3, 4, 5, 8, 10, 20, 30, 40, 50, 80, 100-fold, or more. The difference (also referred to as “fold-change”) indicates a correlation of the downregulation or upregulation of the relevant gene and neuropathic pain. The greater the fold-change in expression and/or the higher the degree of correlation with neuropathic pain, the more preferable the nucleic acid or protein is as a surrogate marker of neuropathic pain.

[0049] The first and the second samples can be obtained from the same mammal or from different mammals. For example, the first and second samples can be obtained from the same mammal from different regions of the skin, one region affected by neuropathic pain or peripheral neuropathy, and the other region not affected by pain or neuropathy. In another example, the first and second samples can be obtained from the same region of the skin in the same mammal but at different times. For example, a first sample can be collected prior to inducing neuropathic pain and the second sample is obtained following induction of neuropathic pain. In yet another example, the first sample can be collected from the region affected by neuropathic pain, and the second sample is obtained from the same region following treatment. Alternatively, the first and second samples can be obtained from different mammals and the amounts of a nucleic acid or protein are compared with reference to a common control using statistical analysis.

[0050] Illustrative methods of identifying a surrogate marker of neuropathic pain in rats are provided in the Examples. 308 rat nucleic acids (Table 2) were identified following these illustrative methods. Corresponding protein sequences and human orthologues were then identified using publicly available databases such as GenBank™. 162 rat protein sequences (Table 3), 160 human nucleic acid sequences (Table 4), and 160 human protein sequences (Table 5) were identified in this manner.

[0051] The invention provides a method of evaluating the level of neuropathic pain in a mammal, comprising:
[0052] (a) obtaining a first skin biopsy sample under conditions of neuropathic pain;
[0053] (b) obtaining a second skin biopsy sample under conditions of substantially no neuropathic pain;
[0054] (c) preparing tissue extracts from the first and the second samples; and
[0055] (d) determining an amount of at least one nucleic acid or protein in the tissues, the nucleic acid or the protein being a surrogate marker of neuropathic pain;
   wherein a difference between the amount of the nucleic acid or the protein in the first sample and the amount of the same nucleic acid or protein in the second sample indicates the level of neuropathic pain. In some embodiments, the amount of the nucleic acid or the protein in the first sample will differ from the amount of the same nucleic acid or protein in the second sample by, for example, 2, 3, 4, 5, 8, 10, 20, 30, 40, 50, 80, 100-fold, or more. The difference (“fold-change”) in the expression levels of a relevant surrogate marker of neuropathic pain correlates with the level, or degree, or neuropathic pain. Generally, surrogate markers of neuropathic pain that exhibit greater fold-change values indicate a higher degree of neuropathic pain.

[0056] The first and the second samples can be obtained from the same mammal or from different mammals as described herein.

[0057] In some embodiments, the surrogate marker of neuropathic pain is a nucleic acid. In illustrative embodiments, the nucleic acid comprises a nonredundant subsequence of any one of the rat nucleotide sequences of SEQ ID NOs:1-308, preferably SEQ ID NOs:1-42. In other illustrative embodiments, a surrogate marker of neuropathic pain is a nucleic acid that comprises a nonredundant subsequence of any one of the human nucleotide sequences of SEQ ID NOs:471-630, preferably SEQ ID NOs:471-493.

[0058] In some embodiments, the surrogate marker of neuropathic pain is a protein. In illustrative embodiments, the protein comprises a nonredundant subsequence of any one of the rat protein sequences of SEQ ID NOs:309-470, preferably SEQ ID NOs:309-333. In other illustrative embodiments, a surrogate marker of neuropathic pain is a protein that comprises a nonredundant subsequence of any one of the human protein sequences of SEQ ID NOs:631-790, preferably SEQ ID NOs:631-653.

[0059] Conditions in which neuropathic pain may occur, and therefore may require assessment in the course of diagnosis or treatment, include but are not limited to: traumatic (including iatrogenic) nerve injury, ischemic neuropathy, nerve compression/entrapment, polyneuropathy (hereditary, metabolic, toxic, inflammatory; infectious, paraneoplastic, nutritional, in amyloidosis and vasculitis), plexus injury root compression, stump and phantom pain after amputation, herpes zoster/postherpetic neuralgia, trigeminal and glossopharyngeal neuralgia, cancer-related neuropathy (due to neural invasion of the tumor, surgical nerve damage, radiation-induced nerve damage, chemotherapy-induced neuropathy), stroke (infarct or hemorrhage), multiple sclerosis, spinal cord injury, syringomyelia/syringobulbia, epilepsy, and space-occupying lesions. Examples of specific disorders include diabetic neuropathy, sensory neuropathy of AIDS and antiretroviral toxic neuropathy, idiopathic small fiber neuropathy, leprosy, Fabry disease. Additionally, the method of assessing neuropathic pain may be used to assess induced neuropathic pain in experimental animals, e.g., SNL-induced neuropathic pain in rats as described in the Examples.

[0060] Assessment of pain with the methods of the invention may be conducted in the course of pharmacological and/or nonpharmacological treatments. Nonpharmacological treatments of neuropathic pain include transcutaneous electrical nerve stimulation, spinal cord stimulation, motor cortex stimulation, deep brain stimulation, decompression, neuroma removal, neurotomy, glycerol injection, radiofrequency nerve/root lesion, dorsal root entry zone lesion, and cordotomy.

Surrogate Markers of Neurotrophic Activity

[0061] A subset of surrogate markers of neuropathic pain is expected to be normalized as a result of a treatment with a compound or a composition that reduces neuropathic pain.

[0062] Accordingly, the invention provides a method of evaluating the effect of a compound or composition on the level of neuropathic pain in a mammal, comprising:
[0063] (a) administering the compound or composition to the mammal having neuropathic pain;
[0064] (b) obtaining at least one skin biopsy sample from the mammal;
[0065] (c) preparing a tissue extract from the skin biopsy sample; and
[0066] (d) determining an amount of at least one nucleic acid or protein in the tissue extract, the nucleic acid or the protein being a surrogate marker of neuropathic pain;
   wherein a difference in the amount of the nucleic acid or protein determined in step (d) and the amount of the same nucleic acid or protein expressed in the absence of the compound or composition indicates the level of efficacy of the compound or composition on neuropathic pain.

[0067] The amount of a nucleic acid or protein expressed in the absence of the compound or composition can be determined by any suitable method. In one method, the amount of the nucleic acid or protein in the test sample is compared to the amount of the same nucleic acid or protein in another sample obtained in the absence of the compound or composition from the same mammal or from different mammals. The control sample may be collected before, during, or after the analysis. In another method, the amount of the nucleic acid or protein in the test sample is compared to that of one or more internal references. An internal reference is a nucleic acid or a protein whose expression levels under given conditions are known. Most typically, the reference is a gene that remains relatively constant under various conditions such as a housekeeping gene, e.g., actin or GAPDH.

[0068] In some embodiments, the amount determined in step (d) will differ from the amount of the same nucleic acid or protein expressed in the absence of the compound or composition by, for example, 2, 3, 4, 5, 8, 10, 20, 30, 40, 50, 80, 100-fold, or more. The “normalization” of the expression level of a relevant surrogate marker of neuropathic pain towards the baseline expression level as in normal conditions (substantially no neuropathic pain) indicates that the compound or composition reduces neuropathic pain. The difference in expression levels under conditions of neuropathic pain and upon “normalization” (“fold-change-back”) indicates the level of neurotrophic activity of the compound or composition being evaluated. Generally, the greater fold-change-back values indicate that the compound or composition is expected to exhibit greater efficacy in treating neuropathic pain. Although greater fold-change-back values are preferred, it is also preferred that a fold-change-back value for a particular surrogate marker of neuropathic pain does not substantially exceed a corresponding fold-change value for the marker.

[0069] Illustrative methods of evaluating the effect of a compound or composition on the level of neuropathic pain in rats are provided in the Examples. 107 rat nucleic acids (Table 6) were identified following these methods. Corresponding protein sequences and human orthologues were then identified using publicly available databases such as GenBank™. 65 rat protein sequences (Table 7), 76 human nucleic acid sequences (Table 8); and 76 human protein sequences (Table 9) were identified in this manner.

[0070] In some embodiments, the surrogate marker of neurotrophic activity is a nucleic acid. In illustrative embodiments, the nucleic acid comprises a nonredundant subsequence of any one of the rat nucleotide sequences of SEQ ID NOs:791-897, preferably SEQ ID NOs:791-814. In other illustrative embodiments, a surrogate marker of neurotrophic activity is a nucleic acid that comprises a nonredundant subsequence of any one of the human nucleotide sequences of SEQ ID NOs:963-1038, preferably SEQ ID NOs:963-979.

[0071] In some embodiments, the surrogate marker of neurotrophic activity is a protein. In illustrative embodiments, the protein comprises a nonredundant subsequence of any one of the rat protein sequences of SEQ ID NOs:898-962, preferably SEQ ID NOs:898-914. In other illustrative embodiments, the surrogate marker of neurotrophic activity is a protein that comprises a nonredundant subsequence of any one of the human protein sequences of SEQ ID NOs:1039-1114, preferably SEQ ID NOs:1039-1055.

[0072] In some embodiments, the compound or composition to be evaluated is or comprises a neurotrophic agent. “Neurotrophic agent” is a compound that has neurotrophic activity, i.e., it affects generation, survival, growth, or maintenance of normal physiological function of neurons. Neurotrophic activity can be evaluated/measured by one or more methods known in the art, for example:
[0073] (1) RET kinase receptor activation ELISA (KIRA) (Milbrandt et al. (1998) Neuron, 20:245; Sadick et al., 1996, Anal. Biochem., 1996. 235(2):207);
[0074] (2) choline acyteltransferease enzymatic assays (Leibrock et al. (1989) Nature, 341:149;
[0075] (3) ³H-dopamine uptake assay with dopaminergic neurons (Lev-Fen et al. (1993) Science, 260:1130; or
[0076] (4) rat pheochromocytome cell line PC12 assays (Ernfors et al. (1991) Nature, 350:1756; Darling et al. (1984) Methods for preparation and assay of nerve growth factor”, Cell Culture Methods for Molecular and Cellular Biology, vol. 4 (eds. Barnes et al.), pp. 79-83, Alan R. Liss, New York; Bradshaw (1978) Ann Rev. Biochem, 47:191).

[0077] In illustrative embodiments, the neurotrophic agent being evaluated is artemin. Other examples of neurotrophic agents include neurotrophic factors such as other members of the GDNF family (e.g., GDNF, neurturin, persephin), nerve growth factor (NG F), brain-derived neurotrophic factor (BDNF), neutrotrophin-3 (NT-3), leukocyte migration inhibitory factor (LIF), interleukin 6 (IL6), basic fibroblast growth factor (bFGF), midkine, neutrotrophin-4 (NT4), ciliary neurotrophic factor (CNTF), pleiotrophin, epidermal growth factor (EGF), hepatocyte growth factor (HGF), vascular endothelial growth factor (VEGF), and insulin-like growth factor type 1 (IGF-1). Yet other examples of neurotrophic agents include agonists and antagonists of these neurotrophic factors or their respective receptors. Examples of agonist and/or antagonists include antibodies against a neurotrophic factor or their receptors and soluble forms of the receptors such as GFR-α (receptor for neurturin); RETα4 (receptor for persephin); GFRα3 (receptor for artemin), TrkA (receptor for NGF), TrkB (receptor for BDNF), TrkC (receptor for NT-3), gp130/LIFRβ (receptor for LIF), and gp130 (receptor for IL6).

[0078] In some embodiments, the compound or composition to be evaluated is a drug or drug candidates for treating neuropathies and include neurotrophic agents as described herein. Examples of drugs that are currently used for the treatment of neuropathic pain, and therefore may be evaluated for neurotrophic activity, include antidepressants (amitriptyline, maprotiline, selective serotonin reuptake inhibitors), antiepileptics (gabapentin, carbamazepine, clonazepam, lamotrigine, topiramate, phenyloin), local anesthetics, mexiletine, baclofen, clonidine, ketamine, dextrorphan, tramadol, guanethidine, and opioids (morphine, methadone, ketobemidone, fentanyl).

### Biomarkers of Neurotrophic Agents

[0079] The invention provides a method of identifying a biomarker of biological activity of a “neurotrophic agent” (as described herein). The method comprises:
[0080] (a) administering the agent to a mammal;
[0081] (b) obtaining at least one skin biopsy sample from the mammal;
[0082] (c) preparing a tissue extract from the skin biopsy sample; and
[0083] (d) determining an amount of at least one nucleic acid or protein in the tissue extract;
   wherein a difference in the amount of the nucleic acid or protein determined in step (d) and the amount of the same nucleic acid or protein expressed in the absence of the agent indicates that the nucleic acid or the protein is a biomarker of in vivo biological activity of the agent. In some embodiments, the amount determined in step (d) will differ from the amount of the same nucleic acid or protein expressed in the absence of the agent by, for example, 2, 3, 4, 5, 8, 10, 20, 30, 40, 50, 80, 100-fold, or more. The difference in the levels of expression that is attributed to the presence of biologically active neurotrophic agent is termed “biomarker-fold-change.” The greater the biomarker-fold-change value is, the more preferable the nucleic acid or protein is as a biomarker of biological activity of a neurotrophic agent. Some biomarkers (e.g., SEQ ID NO:1120 and SEQ ID NO:1126) may also represent surrogate markers of pain, i.e., they correlate with both neuropathic pain and the presence of a biologically active neurotrophic agent. Additionally, some of these biomarkers (e.g., SEQ ID NO:1120 and SEQ ID NO:1126) may also serve as surrogate markers of neurotrophic activity.

[0084] The amount of the same nucleic acid or protein expressed in the absence of the compound or composition can be determined by any suitable method. The skin biopsy sample(s) can be obtained from the same mammal or from different mammals.

[0085] Illustrative methods of identifying a biomarker of biological activity of a “neurotrophic agent” in rats are provided in the Examples below. 49 rat nucleic acids (Table 10) were identified following these methods. Corresponding protein sequences and human orthologues were then identified using publicly available databases such as GenBank™. 15 rat protein sequences (Table 11), 29 human nucleic acid sequences (Table 12); and 29 human protein sequences (Table 13) were identified in this manner.

[0086] The invention provides a method of evaluating biological activity of a neurotrophic agent, comprising:
[0087] (a) administering the agent to a mammai;
[0088] (b) obtaining at least one skin biopsy sample from the mammal;
[0089] (c) preparing a tissue extract from the skin biopsy sample; and
[0090] (d) determining an amount of at least one nucleic acid or protein in the tissue extract; the nucleic acid or protein being a biomarker of the biological activity of the neurotrophic agent;
   wherein a difference in the amount of the nucleic acid or protein determined in step (d) and the amount of the same nucleic acid or protein expressed in the absence of the agent indicates that the agent is biologically active. In some embodiments, the amount determined in step (d) will differ from the amount of the same nucleic acid or protein expressed in the absence of the agent by, for example, 2, 3, 4, 5, 8, 10, 20, 30, 40, 50, 80, 100-fold, or more.

[0091] The amount of the same nucleic acid or protein expressed in the absence of the compound or composition can be determined by any suitable method. The skin biopsy sample(s) can be obtained from the same mammal or from different mammals.

[0092] In illustrative embodiments, the neurotrophic agent being evaluated is artemin, a member of the GDNF family.

[0093] In some embodiments, the biomarker of biological activity of a neurotrophic agent is a nucleic acid. In illustrative embodiments, the nucleic acid comprises a nonredundant subsequence of any one of the rat nucleotide sequences of SEQ ID NOs:1115-1163, preferably SEQ ID NOs:1115-1120. In other illustrative embodiments, a biomarker of biological activity of a neurotrophic agent is a nucleic acid that comprises a nonredundant subsequence of any one of the human nucleotide sequences of SEQ ID NOs:1179-1207, preferably SEQ ID NOs:1179-1182.

[0094] In some embodiments, the biomarker of biological activity of a neurotrophic agent is a protein. In illustrative embodiments, the protein comprises a nonredundant subsequence of any one of the rat protein sequences of SEQ ID NOs:1164-1178, preferably SEQ ID NOs:1164-1166. In other illustrative embodiments, a biomarker of biological activity of a neurotrophic agent is a protein that comprises a nonredundant subsequence of any one of the human protein sequences of SEQ ID NOs:1208-1236, preferably SEQ ID NOs:1208-1211.

General Methods

[0095] Various methods for obtaining skin biopsies are available. The least invasive is removal of the epidermis by placing a suction capsule with over the skin for 30-90 min to develop the blister. The epidermis separates cleanly at the dermal-epidermal junction (Kennedy et al. (1999) Muscle Nerve, 98:323-329; U.S. Pat. No. 6,071,247). This approach is painless and occurs without bleeding because all of the blood vessels terminate beneath the epidermis in the dermal papillae. For these reasons it may be particularly safe on, for example, the feet of diabetic patients. Another approach is simple punch biopsy of the skin. This procedure is also well tolerated. If the biopsy diameter is restricted to 3 mm or less no suture is needed. The biopsy site heals by granulation and leaves a small circular scar that gradually resolves.

[0096] Expression levels, at the RNA or at the protein level, can be determined using conventional methods. Expression levels are usually scaled and/or normalized per total amount of RNA or protein in the sample and/or a control, which is typically a housekeeping gene such actin or GAPDH). RNA levels may be determined by, e.g., quantitative PCR (e.g., TaqMan™ PCR or RT-PCR), Northern blotting, or any other method for determining RNA levels, e.g., as described in Sambrook et al. (eds.) Cloning: A Laboratory Manual, 2nd ed., Cold Spring Harbor Laboratory Press, 1989, or Lodie et al. (2002) Tissue Eng., 8(5):739-751), or as described in the Examples. Protein levels may be determined, .e.g., by using Western blotting, ELISA, enzymatic activity assays, or any other method for determining protein levels, e.g., as described in Current Protocols in Molecular Biology (Ausubel et al. (eds.) New York: John Wiley and Sons, 1998).

[0097] One or more markers of the same or different type can be used in the in the methods of the invention. For example, 1, 2, 3, 4, 5 or more nucleic acids and/or 1, 2, 3, 4, 5 or more proteins can be used for a read-out for (a) neuropathic pain, (b) effect of a compound or composition on the level of neuropathic pain, and/or (c) evaluating biological activity of a neurotrophic agent.

[0098] While representative procedures shown in the Examples are performed using rodents, a skilled artisan will recognize that such procedures can be successfully performed in other mammal and within parameters clinically feasible in human subjects. For example, skin biopsies can be obtained from human patients having neuropathic pain and then subjected to a similar analysis as described herein. For human samples, commercially or custom-made human gene arrays can be used (e.g., Affymatrix™ Human Genome sets U133, U133A, and U95).

[0099] The term “nonredundant subsequence,” as used herein, refers to a subsequence which is unique to the sequence in which it occurs. In some embodiments, a nonredunant subsequence is at least, for example, 10, 15, 20, 30, 40, 50, 70, 100, 200, 300, 400, 500, 1000, or 1500 nucleotides long.

[0100] All or some of the following sequences and their nonredundant subsequences can be excluded from certain embodiments: (a) rat DNA SMPs as set out in SEQ ID NOs: 8, 15, 100, 171, 199, 244; (b) rat protein SMPs as set out in SEQ ID NOs: 315, 318, 408, 420; (c) human DNA SMPs as set out in SEQ ID NOs: 476, 478, 568, 578; (d) human protein SMP sas set out in SEQ ID NOs: 636, 638, 728, 738; (e) rat DNA SMNs as set out in SEQ ID NOs: 798, 834; (f) rat protein SMN set out in SEQ ID NO:903; (g) human DNA SMN set out in SEQ ID NO:967; (h) human protein SMN as set out in SEQ ID NO:1043; and (i) sequences disclosed U.S. Patent Application Publication No. US2003/0216341.

TABLE 2
Rat DNA SMPs

| SEQ | | Accession |
|---|---|---|
| ID NO: | AffyID ™ | Number |
| 1 | rc_AI639444_at | NM_057191* |
| 2 | rc_AA946094_at | NM_021588 |
| 3 | rc_AA891522_f_at | NM_017240* |
| 4 | rc_AA799471_at | AA799471 |
| 5 | rc_AI172339_at | NM_175844 |
| 6 | U31816_s_at | U31816 |
| 7 | M24393_at | NM_017115* |
| 8 | M98819mRNA_s_at | M98819 |
| 9 | rc_AI010701_at | AI010701 |
| 10 | rc_AI010736_at | AI010736 |
| 11 | X07314cds_at | X07314* |
| 12 | rc_AI639444_g_at | NM_057191* |
| 13 | rc_AA799396_at | AA799396 |
| 14 | rc_AI169831_at | AI169831 |
| 15 | rc_AI012182_s_at | NM_033234 |
| 16 | L04684_at | L04684 |
| 17 | rc_AI171653_at | AI171653 |
| 18 | rc_AA818804_at | AA818804 |
| 19 | rc_AI044544_at | AI044544 |
| 20 | M12098_s_at | NM_012604* |
| 21 | rc_AI073178_at | AI073178 |
| 22 | M27151_at | NM_013172* |
| 23 | rc_AI227690_at | AI227690 |
| 24 | rc_AI175100_at | AI175100 |
| 25 | AF077338_at | NM_031813* |
| 26 | X74832cds_at | NM_024485* |
| 27 | rc_AI105049_at | AI105049 |
| 28 | rc_AA866452_s_at | AA866452* |
| 29 | AA108284_at | NM_019292* |
| 30 | rc_AI104913_at | NM_013044* |
| 31 | rc_AA818120_at | AA818120 |
| 32 | X59864mRNA_at | X59864 |
| 33 | AF039832_g_at | NM_019334 |
| 34 | X15939_i_at | NM_017240* |
| 35 | rc_AA851497_f_at | AA851497 |
| 36 | rc_AA818845_at | AA818845 |
| 37 | X14812_at | NM_012606* |
| 38 | rc_AA800206_at | AA800206* |
| 39 | X15939_r_at | NM_017240* |
| 40 | rc_AA901245_at | AA901245 |
| 41 | X59864mRNA_g_at | X59864 |
| 42 | rc_AA924417_f_at | NM_053395* |
| 43 | rc_AI170763_at | AI170763 |
| 44 | rc_AI170764_at | AI170764 |
| 45 | rc_AA818947_at | AA818947 |
| 46 | X81193_at | NM_057144* |
| 47 | rc_AI170760_at | AI170760 |
| 48 | X80130_cds i_at | X80130 |
| 49 | rc_AA818952_at | AA818952 |
| 50 | rc_AA819140_at | NM_019292* |
| 51 | rc_AI170696_at | NM_133583 |
| 52 | rc_AI170687_at | AI170687 |
| 53 | rc_AA998888_f_at | AA998888* |
| 54 | rc_AA819891_at | AA819891 |
| 55 | rc_AA998685_f_at | AA998685* |
| 56 | rc_AA998374_f_at | AA998374 |
| 57 | rc_AA849917_at | AA849917 |
| 58 | rc_AA819868_at | AA819868 |
| 59 | rc_AA849501_s_at | AA849501* |
| 60 | rc_AA819699_at | AA819699 |
| 61 | rc_AA892801_at | NM_017245 |
| 62 | rc_AA875288_at | AA875288 |
| 63 | rc_AA891037_at | AA891037 |
| 64 | rc_AA891903_at | AA891903 |
| 65 | rc_AA891938_at | AA891938 |
| 66 | rc_AA892287_at | AA892287 |
| 67 | rc_AA892313_at | AA892313 |
| 68 | rc_AI172259_at | AI172259 |
| 69 | rc_AA892468_g_at | NM_138836 |
| 70 | rc_AA859829_g_at | AA859829 |
| 71 | rc_AA892860_g_at | AA892860 |
| 72 | rc_AA892999_at | AA892999 |
| 73 | rc_AA893195_at | AA893195 |
| 74 | rc_AA893199_at | AA893199 |
| 75 | rc_AA893307_at | AA893307 |
| 76 | rc_AA894101_g_at | AA894101 |
| 77 | rc_AA892468_at | NM_138836 |
| 78 | rc_AI233870_at | AI233870 |
| 79 | X96437mRNA_g_at | X96437 |
| 80 | Y09453cds_at | NM_019255 |
| 81 | Z78279_at | Z78279 |
| 82 | rc_AI172054_at | AI172054 |
| 83 | rc_AI172150_at | AI172150 |
| 84 | rc_AI172171_at | AI172171 |
| 85 | rc_AA875206_at | NM_053747 |
| 86 | rc_AI172189_at | AI172189 |
| 87 | rc_AA859931_g_at | AA859931 |
| 88 | rc_AI233915_at | AI233915 |
| 89 | rc_AI236229_at | AI236229 |
| 90 | rc_AA849974_at | AA849974 |
| 91 | rc_AA858869_at | AA858869 |
| 92 | rc_AA858921_at | AA858921 |
| 93 | rc_AA859335_at | NM_017147* |
| 94 | X90475cds_at | X90475* |
| 95 | rc_AI172183_at | AI172183 |
| 96 | K03467_s_at | NM_012604* |
| 97 | H32169_at | H32169 |
| 98 | H32451_at | H32451 |
| 99 | J00692_at | J00692* |
| 100 | J01435cds#8_s_at | J01435 |
| 101 | J01436cds_s_at | J01436 |
| 102 | J04993_at | NM_017184* |
| 103 | L11694_at | NM_017033 |
| 104 | K02423cds_s_at | NM_020104* |
| 105 | D38056_at | NM_053599 |
| 106 | L00088exp_cds#2_at | NM_020104* |
| 107 | L00382cds_at | L00382* |
| 108 | L01702_at | NM_012763 |
| 109 | L01793_at | NM_031043 |
| 110 | L01793_g_at | NM_031043 |
| 111 | rc_AA799773_g_at | AA799773 |
| 112 | K02111_at | K02111* |
| 113 | AF052540_s_at | NM_017117 |
| 114 | AA942808_at | AA942808 |
| 115 | AB000216_at | NM_134403 |
| 116 | AB009999_g_at | NM_031242 |
| 117 | AF002281_at | NM_053650 |
| 118 | AF008439_at | NM_013173 |
| 119 | AF013144_at | NM_133578 |
| 120 | E12625cds_at | NM_080886 |
| 121 | AF037072_at | NM_019292* |
| 122 | D64046_at | NM_022185 |
| 123 | AF061726_s_at | NM_017117* |
| 124 | AF077338_g_at | NM_031813* |
| 125 | AF080507_at | AF080507 |
| 126 | AF086624_s_at | NM_022602 |
| 127 | AF093536_at | NM_031810 |
| 128 | D37920_at | NM_017136 |
| 129 | L13606_at | L13606* |
| 130 | AF030089UTR#1_at | NM_021584 |
| 131 | rc_AA800245_at | AA800245* |
| 132 | M83298_g_at | NM_053999 |
| 133 | M83676_at | M83676 |
| 134 | M84176_at | NM_176079* |
| 135 | M86621_at | NM_012919 |
| 136 | M89945mRNA_g_at | M89945 |
| 137 | rc_AA799571_at | AA799571 |
| 138 | L08505_at | NM_019226 |
| 139 | rc_AA800221_at | NM_053395* |
| 140 | M57263_at | NM_031659 |
| 141 | rc_AA800637_at | AA800637 |
| 142 | rc_AA817802_at | AA817802 |
| 143 | rc_AA817929_at | AA817929 |
| 144 | rc_AA817969_at | AA817969 |
| 145 | rc_AA817975_at | NM_031355 |
| 146 | rc_AA818745_at | AA818745 |
| 147 | rc_AA799773_at | AA799773 |
| 148 | M21759mRNA_at | M21759 |
| 149 | L24897_s_at | L24897* |
| 150 | L27124_s_at | NM_012993 |
| 151 | L28818cds_at | NM_022195 |
| 152 | M10140_at | NM_012530* |
| 153 | M13100cds#2_s_at | M13100 |
| 154 | M16112_at | NM_021739 |
| 155 | M63122_at | NM_013091 |
| 156 | M18330_at | NM_133307 |
| 157 | M62752_at | NM_012660 |
| 158 | M23995_g_at | NM_017272 |
| 159 | M27434_s_at | NM_147214 |
| 160 | M32397_at | NM_020072 |
| 161 | M37941mRNA_s_at | NM_138876 |
| 162 | M37942 | M37942 |
| | exon#2-3_s_at | |
| 163 | M55534mRNA_s_at | NM_012935 |
| 164 | rc_AA818807_at | AA818807 |
| 165 | M16112_g_at | NM_021739 |
| 166 | rc_AI232024_f_at | NM_017239* |
| 167 | rc_AI180281_at | NM_175843 |
| 168 | rc_AI180442_at | NM_031840 |
| 169 | rc_AI227677_at | AI227677 |
| 170 | rc_AI230247_s_at | NM_019192 |
| 171 | rc_AI230319_at | NM_171992 |
| 172 | rc_AI230596_at | AI230596 |
| 173 | rc_AI639187_at | AI639187 |
| 174 | rc_AI231572_at | AI231572 |
| 175 | rc_AI178893_at | AI178893 |
| 176 | rc_AI236301_at | AI236301 |
| 177 | rc_AI237371_at | NM_031812 |
| 178 | rc_AI237700_at | AI237700 |
| 179 | rc_AI638960_at | AI638960 |
| 180 | rc_AI638986_s_at | AI638986 |
| 181 | rc_AI171376_at | NM_053395* |
| 182 | rc_AI231279_at | AI231279 |
| 183 | rc_AI175328_at | AI175328 |
| 184 | rc_AA945861_at | AA945861 |
| 185 | rc_AI171774_at | AI171774* |
| 186 | rc_AI172006_at | NM_021666 |
| 187 | rc_AI172423_at | NM_181368 |
| 188 | rc_AI172597_at | AI172597 |
| 189 | rc_AI175011_at | AI175011 |
| 190 | rc_AI179243_at | NM_145775 |
| 191 | rc_AI175258_at | AI175258 |
| 192 | rc_AI178921_s_at | NM_013159 |
| 193 | rc_AI175348_at | AI175348 |
| 194 | rc_AI175507_at | AI175507 |
| 195 | rc_AI175539_at | NM_022499* |
| 196 | rc_AI175935_at | NM_173101* |
| 197 | rc_AI176584_at | NM_012817 |
| 198 | rc_AI178559_at | NM_012923 |
| 199 | rc_AI639233_s_at | AI639233 |
| 200 | rc_AI175045_at | AI175045 |
| 201 | X70871_at | NM_012923 |
| 202 | X52311_at | NM_054006 |
| 203 | X53504cds_at | X53504 |
| 204 | X53504cds_g_at | X53504 |
| 205 | X56133_at | X56133* |
| 206 | X60351cds_s_at | NM_012935 |
| 207 | X64401cds_s_at | NM_173144 |
| 208 | rc_AI639178_at | AI639178 |
| 209 | X70369_s_at | X70369 |
| 210 | X04267_at | NM_012604* |
| 211 | X74835cds_at | NM_019298 |
| 212 | X76489cds_g_at | X76489 |
| 213 | X78848cds_f_at | NM_031509 |
| 214 | X80130cds_f_at | X80130* |
| 215 | Z78279_g_at | Z78279 |
| 216 | Z83869cds_at | NM_021699 |
| 217 | X64827cds_s_at | NM_012786* |
| 218 | U20195_s_at | NM_017033 |
| 219 | rc_AI639324_at | AI639324 |
| 220 | rc_AI639410_i_at | AI639410 |
| 221 | rc_AI639410_s_at | AI639410 |
| 222 | rc_AI639465_f_at | NM_080903* |
| 223 | rc_AI639532_at | AI639532 |
| 224 | rc_H33725_at | NM_138531 |
| 225 | X15939_f_at | NM_017240* |
| 226 | S74265_s_at | NM_013066 |
| 227 | X12554cds_s_at | NM_012812 |
| 228 | U25651_at | NM_031715* |
| 229 | U30938_at | NM_013066 |
| 230 | U40836mRNA_s_at | NM_012786 |
| 231 | U50736_s_at | NM_013220 |
| 232 | U84727_at | NM_022398 |
| 233 | U96130_at | NM_031043 |
| 234 | rc_AI171372_at | AI171372 |
| 235 | S49760_at | NM_080787 |
| 236 | rc_AI029057_at | AI029057 |
| 237 | rc_AI010583_at | NM_133424 |
| 238 | rc_AI010605_at | AI010605* |
| 239 | rc_AI010742_at | AI010742 |
| 240 | rc_AI011563_s_at | AI011563 |
| 241 | rc_AI011709_at | AI011709 |
| 242 | rc_AI011855_at | AI011855 |
| 243 | rc_AI070208_at | AI070208 |
| 244 | rc_AI014135_g_at | AI014135 |
| 245 | rc_AA996612_at | AA996612 |
| 246 | rc_AI029152_at | AI029152 |
| 247 | rc_AI030091_at | AI030091 |
| 248 | rc_AI043640_at | AI043640 |
| 249 | rc_AI044292_s_at | AI044292 |
| 250 | rc_AI045097_at | AI045097 |
| 251 | rc_AI171535_s_at | AI171535 |
| 252 | rc_AI014132_at | AI014132 |
| 253 | rc_AA946469_at | AA946469 |
| 254 | rc_AA924500_at | AA924500 |
| 255 | rc_AA925122_at | AA925122 |
| 256 | rc_AA925342_at | AA925342 |
| 257 | rc_AA925664_at | AA925664 |
| 258 | rc_AA944401_at | AA944401 |
| 259 | rc_AA944560_at | NM_153469 |
| 260 | rc_AI010562_at | AI010562* |
| 261 | rc_AA946457_at | AA946457 |
| 262 | rc_AA997341_at | NM_053326 |
| 263 | rc_AA955927_at | AA955927 |
| 264 | rc_AA957123_at | AA957123 |
| 265 | rc_AA963167_at | AA963167 |
| 266 | rc_AA963627_at | AA963627 |
| 267 | rc_AA963742_at | AA963742 |
| 268 | rc_AA964584_at | AA964584 |
| 269 | rc_AI070399_at | AI070399 |
| 270 | rc_AA946108_at | NM_173306 |
| 271 | rc_AI168935_at | AI168935 |
| 272 | rc_AI104924_f_at | NM_017239* |
| 273 | rc_AI059955_s_at | NM_053959 |
| 274 | rc_AI112050_at | AI112050 |
| 275 | rc_AI112084_at | AI112084 |
| 276 | rc_AI113309_at | AI113309 |
| 277 | rc_AI136540_at | AI136540* |
| 278 | rc_AA924428_at | AA924428 |
| 279 | rc_AI145367_at | NM_053874 |
| 280 | rc_AI104864_g_at | AI104864 |
| 281 | rc_AI169265_at | AI169265 |
| 282 | rc_AI170777_at | NM_024398 |
| 283 | rc_AI170777_g_at | NM_024398 |
| 284 | rc_AI170793_at | AI170793 |
| 285 | rc_AI170894_at | AI170894 |
| 286 | rc_AI170985_at | NM_020104* |
| 287 | rc_AI171098_at | AI171098* |
| 288 | rc_AI137958_at | AI137958 |
| 289 | rc_AI103376_at | AI103376 |
| 290 | rc_AI071299_at | NM_031135 |
| 291 | rc_AI071328_at | AI071328 |
| 292 | rc_AI071769_at | AI071769 |
| 293 | rc_AI072166_at | AI072166 |
| 294 | rc_AI101481_at | AI101481 |
| 295 | rc_AI111401_s_at | AI111401 |
| 296 | rc_AI102103_g_at | NM_031083 |
| 297 | rc_AI103473_at | NM_021865 |
| 298 | rc_AI103507_at | AI103507 |
| 299 | rc_AI103920_f_at | NM_017239* |
| 300 | rc_AI104035_s_at | AI104035 |
| 301 | rc_AI104326_at | AI104326 |
| 302 | rc_AI104349_at | AI104349 |
| 303 | rc_AI104354_at | AI104354 |
| 304 | rc_AI102057_at | AI102057 |
| 305 | rc_AI104567_g_at | AI104567* |
| 306 | rc_AA892861_at | AA892861 |
| 307 | rc_AI179358_at | AI179358 |
| 308 | AA799397_at | AA799397 |

*Muscle-specific

[0101] TABLE 3
Rat Protein SMPs

| SEQ | | | Table 2 |
|---|---|---|---|
| ID | | Accession | SEQ |
| NO: | AffyID ™ | Number | ID NO: |
| 309 | rc_AI639444_at | Q9ER30* | 1 |
| 310 | rc_AA946094_at | Q9QZ76 | 2 |
| 311 | rc_AA891522_f_at | P02564* | 3 |
| 312 | rc_AI172339_at | Q8K4K7 | 5 |
| 313 | U31816_s_at | Q02485 | 6 |
| 314 | M24393_at | P20428* | 7 |
| 315 | M98819 | NP_620231 | 8 |
| | mRNA_s_at | | |
| 316 | X07314cds_at | P08733* | 11 |
| 317 | rc_AI639444_g_at | Q9ER30* | 12 |
| 318 | rc_AI012182_s_at | P02091 | 15 |
| 319 | L04684_at | Q02485 | 16 |
| 320 | M12098_s_at | Q9QZV8* | 20 |
| 321 | M27151_at | P19335* | 22 |
| 322 | AF077338_at | O88599* | 25 |
| 323 | X74832cds_at | P25108* | 26 |
| 324 | rc_AA866452_s_at | P03996* | 28 |
| 325 | AA108284_at | P14141* | 29 |
| 326 | rc_AI104913_at | P70567* | 30 |
| 327 | X59864mRNA_at | Q03668** | 32 |
| 328 | AF039832_g_at | Q9R0W1 | 33 |
| 329 | X15939_i_at | P02564* | 34 |
| 330 | X14812_at | P16409* | 37 |
| 331 | X15939_r_at | P02564* | 39 |
| 332 | X59864 | Q03668** | 41 |
| | mRNA_g_at | | |
| 333 | rc_AA924417_f_at | Q925F0* | 42 |
| 334 | X81193_at | P50463* | 46 |
| 335 | X80130cds_i_at | P04270 | 48 |
| 336 | rc_AA819140_at | P14141* | 50 |
| 337 | rc_AI170696_at | Q8VBU2 | 51 |
| 338 | rc_AA819891_at | Q9R272 | 54 |
| 339 | rc_AA849501_s_at | Q63518* | 59 |
| 340 | rc_AA892801_at | P05197 | 61 |
| 341 | rc_AA892468_g_at | Q9ES87 | 69 |
| 342 | rc_AA892468_at | Q9ES87 | 77 |
| 343 | Y09453cds_at | P97707 | 80 |
| 344 | Z78279_at | Q63079 | 81 |
| 345 | rc_AA875206_at | Q9JJP9 | 85 |
| 346 | rc_AA858869_at | AAO34127 | 91 |
| 347 | rc_AA859335_at | P45592* | 93 |
| 348 | X90475cds_at | Q63518* | 94 |
| 349 | K03467_s_at | Q9QZV8* | 96 |
| 350 | J00692_at | P02568* | 99 |
| 351 | J01436cds_s_at | AAA99907 | 101 |
| 352 | J04993_at | P13413* | 102 |
| 353 | L11694_at | P38652 | 103 |
| 354 | K02423cds_s_at | NP_064489* | 104 |
| 355 | D38056_at | P97553 | 105 |
| 356 | L00088exp_cds# | NP_064489* | 106 |
| 357 | L00382cds_at | AAA42289* | 107 |
| 358 | L01702_at | Q03348 | 108 |
| 359 | L01793_at | O08730 | 109 |
| 360 | L01793_g_at | O08730 | 110 |
| 361 | K02111_at | P04462* | 112 |
| 362 | AF052540_s_at | P16259 | 113 |
| 363 | AB000216_at | O08764 | 115 |
| 364 | AB009999_g_at | O35052 | 116 |
| 365 | AF002281_at | O70208 | 117 |
| 366 | AF008439_at | O54902 | 118 |
| 367 | AF013144_at | O54838 | 119 |
| 368 | E12625cds_at | O35532 | 120 |
| 369 | AF037072_at | P14141* | 121 |
| 370 | D64046_at | Q63788 | 122 |
| 371 | AF061726_s_at | P16259* | 123 |
| 372 | AF077338_g_at | O88599* | 124 |
| 373 | AF086624_s_at | O70444 | 126 |
| 374 | AF093536_at | O89117 | 127 |
| 375 | D37920_at | P52020 | 128 |
| 376 | L13606_at | Q07443* | 129 |
| 377 | AF030089UTR#1_at | Q9WVP7 | 130 |
| 378 | M83298_g_at | P36876 | 132 |
| 379 | M83676_at | P35284 | 133 |
| 380 | M84176_at | NP_788268* | 134 |
| 381 | M86621_at | P54290 | 135 |
| 382 | M89945mRNA_g_at | NP_114028 | 136 |
| 383 | L08505_at | P38650 | 138 |
| 384 | rc_AA800221_at | Q925F0* | 139 |
| 385 | M57263_at | P23606 | 140 |
| 386 | rc_AA817975_at | Q9R1Z0 | 145 |
| 387 | M21759mRNA_at | Q99053 | 148 |
| 388 | L24897_s_at | Q63350* | 149 |
| 389 | L27124_s_at | 25499 | 150 |
| 390 | L28818cds_at | NP_071531 | 151 |
| 391 | M10140_at | P00564* | 152 |
| 392 | M16112_at | Q63094 | 154 |
| 393 | M63122_at | P22934 | 155 |
| 394 | M18330_at | 170538 | 156 |
| 395 | M62752_at | P27706 | 157 |
| 396 | M23995_g_at | P13601 | 158 |
| 397 | M27434_s_at | P02761 | 159 |
| 398 | M32397_at | P20646 | 160 |
| 399 | M37941mRNA_s_at | P10759 | 161 |
| 400 | M37942exn#2-3 | NP_620231 | 162 |
| 401 | M55534mRNA_s_at | P23928 | 163 |
| 402 | M16112_g_at | Q63094 | 165 |
| 403 | rc_AI232024_f_at | P02563* | 166 |
| 404 | rc_AI180281_at | O08623 | 167 |
| 405 | rc_AI180442_at | P05369 | 168 |
| 406 | rc_AI227677_at | Q62940 | 169 |
| 407 | rc_AI230247_s_at | P25236 | 170 |
| 408 | rc_AI230319_at | P39948 | 171 |
| 409 | rc_AI231572_at | AAP29778 | 174 |
| 410 | rc_AI237371_at | Q9QX82 | 177 |
| 411 | rc_AI171376_at | Q925F0* | 181 |
| 412 | rc_AI172006_at | Q9QX75 | 186 |
| 413 | rc_AI172423_at | AAP12535 | 187 |
| 414 | rc_AI179243_at | Q63503 | 190 |
| 415 | rc_AI178921_s_at | P35559 | 192 |
| 416 | rc_AI175539_at | P02625* | 195 |
| 417 | rc_AI175935_at | Q63356* | 196 |
| 418 | rc_AI176584_at | P24594 | 197 |
| 419 | rc_AI178559_at | P39950 | 198 |
| 420 | rc_AI639233_s_at | Q01129 | 199 |
| 421 | X70871_at | P39950 | 201 |
| 422 | X52311_at | P18395 | 202 |
| 423 | X53504cds_at | P23358 | 203 |
| 424 | X53504cds_g_at | P23358 | 204 |
| 425 | X56133_at | P15999* | 205 |
| 426 | X60351cds_s_at | P23928 | 206 |
| 427 | X64401cds_s_at | P04800 | 207 |
| 428 | X70369_s_at | P13941 | 209 |
| 429 | X04267_at | Q9QZV8* | 210 |
| 430 | X74835cds_at | P25110 | 211 |
| 431 | X76489cds_g_at | P40241 | 212 |
| 432 | X78848cds_f_at | Q9JLX3 | 213 |
| 433 | X80130cds_f_at | P04270* | 214 |
| 434 | Z78279_g_at | Q63079 | 215 |
| 435 | Z83869cds_at | O08679 | 216 |
| 436 | X64827cds_s_at | P16221* | 217 |
| 437 | U20195_s_at | P38652 | 218 |
| 438 | rc_AI639465_f_at | Q91Z63* | 222 |
| 439 | rc_H33725_at | Q8R424 | 224 |
| 440 | X15939_f_at | P02564* | 225 |
| 441 | S74265_s_at | P15146 | 226 |
| 442 | X12554cds_s_at | P10817 | 227 |
| 443 | U25651_at | P47858* | 228 |
| 444 | U30938_at | P15146 | 229 |
| 445 | U40836mRNA_s_at | P16221 | 230 |
| 446 | U50736_s_at | Q8R560 | 231 |
| 447 | U84727_at | P97700 | 232 |
| 448 | U96130_at | O08730 | 233 |
| 449 | S49760_at | 140866 | 235 |
| 450 | rc_AI010583_at | Q8R4I6 | 237 |
| 451 | rc_AA996612_at | Q9Z2J4 | 245 |
| 452 | rc_AA946469_at | AAP29778 | 253 |
| 453 | rc_AA925664_at | O08813 | 257 |
| 454 | rc_AA944560_at | AAN15275 | 259 |
| 455 | rc_AI010562_at | Q63350* | 260 |
| 456 | rc_AA997341_at | Q62920 | 262 |
| 457 | rc_AA946108_at | P70570 | 270 |
| 458 | rc_AI104924_f_at | P02563* | 272 |
| 459 | rc_AI059955_s_at | O08839 | 273 |
| 460 | rc_AI145367_at | P52481 | 279 |
| 461 | rc_AI170777_at | Q9ER34 | 282 |
| 462 | rc_AI170777_g_at | Q9ER34 | 283 |
| 463 | rc_AI170985_at | NP_064489* | 286 |
| 464 | rc_AI171098_at | Q63518* | 287 |
| 465 | rc_AI071299_at | O08876 | 290 |
| 466 | rc_AI111401_s_at | O35217 | 295 |
| 467 | rc_AI102103_g_at | O08561 | 296 |
| 468 | rc_AI103473_at | Q925T0 | 297 |
| 469 | rc_AI103920_f_at | P02563* | 299 |
| 470 | rc_AI104567_g_at | P03996* | 305 |

*Muscle-specific
**SPTREMBL

[0102] TABLE 4
Human DNA SMPs

| SEQ | | | Table 2 |
|---|---|---|---|
| ID | | Accession | SEQ |
| NO: | AffyID ™ | Number | ID NO: |
| 471 | rc_AI639444_at | NM_006063.1* | 1 |
| 472 | rc_AA946094_at | NM_005368.1 | 2 |
| 473 | rc_AA891522_f_at | NM_000257.1* | 3 |
| 474 | rc_AA799471_at | 2330600 | 4 |
| 475 | M24393_at | NM_002479.2* | 7 |
| 476 | M98819mRNA_s_at | NM_000036 | 8 |
| 477 | rc_AI639444_g_at | NM_006063.1* | 12 |
| 478 | rc_AI012182_s_at | NM_000518.4 | 15 |
| 479 | L04684_at | NM_000719 | 16 |
| 480 | rc_AA818804_at | 7022045 | 18 |
| 481 | M12098_s_at | NM_002470.1* | 20 |
| 482 | M27151_at | NM_002469.1* | 22 |
| 483 | AF077338_at | NM_004997.1* | 25 |
| 484 | X74832cds_at | NM_000079.1* | 26 |
| 485 | rc_AA866452_s_at | BC009978* | 28 |
| 486 | AA108284_at | NM_005181.2* | 29 |
| 487 | rc_AI104913_at | NM_003275.1* | 30 |
| 488 | rc_AA818120_at | 1943766 | 31 |
| 489 | AF039832_g_at | NM_000325.3 | 33 |
| 490 | X15939_i_at | NM_000257.1* | 34 |
| 491 | X14812_at | NM_000258.1* | 37 |
| 492 | X15939_r_at | NM_000257.1* | 39 |
| 493 | rc_AA924417_f_at | NM_014332.1* | 42 |
| 494 | X81193_at | NM_003476.1* | 46 |
| 495 | X80130cds_i_at | BC009978 | 48 |
| 496 | rc_AA819140_at | NM_005181.2* | 50 |
| 497 | rc_AI170696_at | NM_016250.1 | 51 |
| 498 | rc_AA892801_at | NM_001961.2 | 61 |
| 499 | rc_AA892287_at | NM_018653 | 66 |
| 500 | rc_AA892313_at | NM_003193 | 67 |
| 501 | rc_AA892468_g_at | NM_002773.2 | 69 |
| 502 | rc_AA859829_g_at | NM_005882 | 70 |
| 503 | rc_AA892468_at | NM_002773.2 | 77 |
| 504 | X96437mRNA_g_at | NM_002727 | 79 |
| 505 | Y09453cds_at | NM_000727.2 | 80 |
| 506 | Z78279_at | BC036531 | 81 |
| 507 | rc_AA875206_at | 222989_s_at | 85 |
| 508 | rc_AA859931_g_at | NM_024069 | 87 |
| 509 | rc_AA859335_at | NM_005507.1* | 93 |
| 510 | K03467_s_at | NM_002470.1* | 96 |
| 511 | H32169_at | BC018256 | 97 |
| 512 | J00692_at | NM_009606* | 99 |
| 513 | J04993_at | NM_003281.2* | 102 |
| 514 | L11694_at | NM_002633.2 | 103 |
| 515 | K02423cds_s_at | NM_079420.1* | 104 |
| 516 | D38056_at | NM_004428.2 | 105 |
| 517 | L00088exp_cds#2_at | NM_079420.1* | 106 |
| 518 | L00382cds_at | X06825* | 107 |
| 519 | L01702_at | NM_002836.2 | 108 |
| 520 | L01793_at | NM_004130.2 | 109 |
| 521 | L01793_g_at | NM_004130.2 | 110 |
| 522 | K02111_at | NM_002470* | 112 |
| 523 | AF052540_s_at | NM_000070.2 | 113 |
| 524 | AB000216_at | NM_145804.1 | 115 |
| 525 | AB009999_g_at | NM_001263.2 | 116 |
| 526 | AF002281_at | NM_014476.1 | 117 |
| 527 | AF008439_at | NM_000617.1 | 118 |
| 528 | AF013144_at | NM_004419.2 | 119 |
| 529 | E12625cds_at | NM_006745.2 | 120 |
| 530 | AF037072_at | NM_005181.2* | 121 |
| 531 | D64046_at | NM_005027.1 | 122 |
| 532 | AF061726_s_at | NM_000070.2* | 123 |
| 533 | AF077338_g_at | NM_004997.1* | 124 |
| 534 | AF093536_at | BC047677 | 127 |
| 535 | D37920_at | NM_003129.2 | 128 |
| 536 | L13606_at | XM_028522* | 129 |
| 537 | AF030089UTR#1_at | NM_004734.1 | 130 |
| 538 | M83298_g_at | NM_002717.2 | 132 |
| 539 | M83676_at | 5410327 | 133 |
| 540 | M84176_at | NM_002478* | 134 |
| 541 | M86621_at | NM_000722.1 | 135 |
| 542 | M89945mRNA_g_at | NM_004462 | 136 |
| 543 | rc_AA799571_at | 13491977 | 137 |
| 544 | L08505_at | NM_001376.2 | 138 |
| 545 | rc_AA800221_at | NM_014332.1* | 139 |
| 546 | M57263_at | NM_000359.1 | 140 |
| 547 | rc_AA817975_at | NM_005662.3 | 145 |
| 548 | rc_AA818745_at | 29488 | 146 |
| 549 | M21759mRNA_at | XM_048104 | 148 |
| 550 | L24897_s_at | XM_028522* | 149 |
| 551 | L27124_s_at | NM_002525.1 | 150 |
| 552 | L28818cds_at | BC046391 | 151 |
| 553 | M10140_at | NM_001824.2* | 152 |
| 554 | M16112_at | NM_001220.3 | 154 |
| 555 | M63122_at | NM_001065.2 | 155 |
| 556 | M18330_at | NM_006254.2 | 156 |
| 557 | M62752_at | NM_001958.2 | 157 |
| 558 | M23995_g_at | NM_000692 | 158 |
| 559 | M32397_at | NM_001099.2 | 160 |
| 560 | M37941mRNA_s_at | NM_000036.1 | 161 |
| 561 | M37942exn#2-3_s_at | NM_000036 | 162 |
| 562 | M55534mRNA_s_at | NM_001885.1 | 163 |
| 563 | M16112_g_at | NM_001220.3 | 165 |
| 564 | rc_AI232024_f_at | NM_002471.1* | 166 |
| 565 | rc_AI180442_at | NM_002004.1 | 168 |
| 566 | rc_AI227677_at | D42055.1 | 169 |
| 567 | rc_AI230247_s_at | NM_005410.1 | 170 |
| 568 | rc_AI230319_at | NM_001758.1 | 171 |
| 569 | rc_AI237371_at | NM_006016.3 | 177 |
| 570 | rc_AI171376_at | NM_014332.1* | 181 |
| 571 | rc_AI172006_at | NM_032467 | 186 |
| 572 | rc_AI179243_at | NM_021724.1 | 190 |
| 573 | rc_AI178921_s_at | NM_004969.1 | 192 |
| 574 | rc_AI175539_at | NM_002854.1* | 195 |
| 575 | rc_AI175935_at | NM_004998.1* | 196 |
| 576 | rc_AI176584_at | NM_000599.1 | 197 |
| 577 | rc_AI178559_at | NM_004060.2 | 198 |
| 578 | rc_AI639233_s_at | NM_001920.2 | 199 |
| 579 | X70871_at | NM_004060.2 | 201 |
| 580 | X52311_at | NM_002524.2 | 202 |
| 581 | X56133_at | NM_004046.3* | 205 |
| 582 | X60351cds_s_at | NM_001885.1 | 206 |
| 583 | X64401cds_s_at | BC003642 | 207 |
| 584 | X70369_s_at | NM_000090.2 | 209 |
| 585 | X04267_at | NM_002470.1* | 210 |
| 586 | X74835cds_at | NM_000751.1 | 211 |
| 587 | X76489cds_g_at | NM_001769.2 | 212 |
| 588 | X78848cds_f_at | NM_000847.3 | 213 |
| 589 | X80130cds_f_at | BC009978* | 214 |
| 590 | Z78279_g_at | BC036531 | 215 |
| 591 | Z83869cds_at | NM_004954.2 | 216 |
| 592 | X64827cds_s_at | J04823* | 217 |
| 593 | U20195_s_at | NM_002633.2 | 218 |
| 594 | rc_AI639324_at | NM_030793 | 219 |
| 595 | rc_AI639465_f_at | NM_032588.2* | 222 |
| 596 | rc_H33725_at | NM_006463.2 | 224 |
| 597 | X15939_f_at | NM_000257.1* | 225 |
| 598 | S74265_s_at | NM_002374.2 | 226 |
| 599 | X12554cds_s_at | NM_005205.2 | 227 |
| 600 | U25651_at | NM_000289.2* | 228 |
| 601 | U30938_at | NM_002374.2 | 229 |
| 602 | U40836mRNA_s_at | 1311703 | 230 |
| 603 | U50736_s_at | NM_014391.1 | 231 |
| 604 | U84727_at | NM_003562.3 | 232 |
| 605 | U96130_at | NM_004130.2 | 233 |
| 606 | S49760_at | BC043292 | 235 |
| 607 | rc_AI010583_at | NM_001104.1 | 237 |
| 608 | rc_AI011709_at | 35526 | 241 |
| 609 | rc_AA996612_at | NM_144573.1 | 245 |
| 610 | rc_AA925122_at | NM_000363 | 255 |
| 611 | rc_AA925664_at | NM_001664 | 257 |
| 612 | rc_AA944560_at | NM_007066.3 | 259 |
| 613 | rc_AA997341_at | NM_006457.1 | 262 |
| 614 | rc_AA946108_at | NM_173306 | 270 |
| 615 | rc_AI168935_at | NM_018286 | 271 |
| 616 | rc_AI104924_f_at | NM_002471.1* | 272 |
| 617 | rc_AI059955_s_at | NM_004305.2 | 273 |
| 618 | rc_AI145367_at | NM_006366.1 | 279 |
| 619 | rc_AI170777_at | NM_001098.1 | 282 |
| 620 | rc_AI170777_g_at | NM_001098.1 | 283 |
| 621 | rc_AI170894_at | NM_001122 | 288 |
| 622 | rc_AI170985_at | NM_079420.1* | 300 |
| 623 | rc_AI103376_at | NM_018112 | 282 |
| 624 | rc_AI071299_at | NM_005655.1 | 235 |
| 625 | rc_AI111401_s_at | NM_004897.2 | 289 |
| 626 | rc_AI102103_g_at | NM_002651.1 | 278 |
| 627 | rc_AI103473_at | NM_018664.1 | 237 |
| 628 | rc_AI103920_f_at | NM_002471.1* | 281 |
| 629 | rc_AI104354_at | NM_016599 | 93 |
| 630 | rc_AI104567_g_at | BC009978* | 200 |

*Muscle-specific

[0103] TABLE 5
Human Protein SMPs

| SEQ | | | Table 2 | Table 4 |
|---|---|---|---|---|
| ID | | Accession | SEQ ID | SEQ ID |
| NO: | AffyID ™ | Number | NO: | NO: |
| 631 | rc_AI639444_at | AAH06534* | 1 | 471 |
| 632 | rc_AA946094_at | P02144 | 2 | 472 |
| 633 | rc_AA891522_f_at | P12883* | 3 | 473 |
| 634 | rc_AA799471_at | O15273 | 4 | 474 |
| 635 | M24393_at | P15173* | 7 | 475 |
| 636 | M98819mRNA_s_at | NP_000027 | 8 | 476 |
| 637 | rc_AI639444_g_at | AAH06534* | 12 | 477 |
| 638 | rc_AI012182_s_at | P02023 | 15 | 478 |
| 639 | L04684_at | NP_000710 | 16 | 479 |
| 640 | rc_AA818804_at | Q9NWB1 | 18 | 480 |
| 641 | M12098_s_at | P11055* | 20 | 481 |
| 642 | M27151_at | AAH17834* | 22 | 482 |
| 643 | AF077338_at | AAH44226* | 25 | 483 |
| 644 | X74832cds_at | P02708* | 26 | 484 |
| 645 | rc_AA866452_s_at | AAH009987* | 28 | 485 |
| 646 | AA108284_at | P07451* | 29 | 486 |
| 647 | rc_AI104913_at | P28289* | 30 | 487 |
| 648 | rc_AA818120_at | O00631 | 31 | 488 |
| 649 | AF039832_g_at | Q99697 | 33 | 489 |
| 650 | X15939_i_at | P12883* | 34 | 490 |
| 651 | X14812_at | AAH09790* | 37 | 491 |
| 652 | X15939_r_at | P12883* | 39 | 492 |
| 653 | rc_AA924417_f_at | Q9UHP9* | 42 | 493 |
| 654 | X81193_at | P50461* | 46 | 494 |
| 655 | X80130cds_i_at | AAH009987 | 48 | 495 |
| 656 | rc_AA819140_at | P07451* | 50 | 496 |
| 657 | rc_AI170696_at | CAD62321 | 51 | 497 |
| 658 | rc_AA892801_at | P13639 | 61 | 498 |
| 659 | rc_AA892287_at | NP_061123.2 | 66 | 499 |
| 660 | rc_AA892313_at | NP_003184.1 | 67 | 500 |
| 661 | rc_AA892468_g_at | Q16651 | 69 | 501 |
| 662 | rc_AA859829_g_at | NP_005873.1 | 70 | 502 |
| 663 | rc_AA892468_at | Q16651 | 77 | 503 |
| 664 | X96437mRNA_g_at | AAH22313 | 79 | 504 |
| 665 | Y09453cds_at | Q06432 | 80 | 505 |
| 666 | Z78279_at | P02452 | 81 | 506 |
| 667 | rc_AA875206_at | NP_038466.2 | 85 | 507 |
| 668 | rc_AA859931_g_at | NP_076974.1 | 87 | 508 |
| 669 | rc_AA859335_at | P23528* | 93 | 509 |
| 670 | K03467_s_at | P11055* | 96 | 510 |
| 671 | H32169_at | NP_068733.1 | 97 | 511 |
| 672 | J00692_at | NP_033736* | 99 | 512 |
| 673 | J04993_at | AAH12600* | 102 | 513 |
| 674 | L11694_at | AAH19920 | 103 | 514 |
| 675 | K02423cds_s_at | AAH05318* | 104 | 515 |
| 676 | D38056_at | P20827 | 105 | 516 |
| 677 | L00088expanded_cds#2_at | AAH05318* | 106 | 517 |
| 678 | L00382cds_at | CAA29971* | 107 | 518 |
| 679 | L01702_at | AAH27308 | 108 | 519 |
| 680 | L01793_at | P46976 | 109 | 520 |
| 681 | L01793_g_at | P46976 | 110 | 521 |
| 682 | K02111_at | NP_002461* | 112 | 522 |
| 683 | AF052540_s_at | P20807 | 113 | 523 |
| 684 | AB000216_at | Q8N961 | 115 | 524 |
| 685 | AB009999_g_at | Q92903 | 116 | 525 |
| 686 | AF002281_at | O43590 | 117 | 526 |
| 687 | AF008439_at | BAB93467 | 118 | 527 |
| 688 | AF013144_at | Q16690 | 119 | 528 |
| 689 | E12625cds_at | Q15800 | 120 | 529 |
| 690 | AF037072_at | P07451* | 121 | 530 |
| 691 | D64046_at | O00459 | 122 | 531 |
| 692 | AF061726_s_at | P20807* | 123 | 532 |
| 693 | AF077338_g_at | AAH44226* | 124 | 533 |
| 694 | AF093536_at | AAH47677 | 127 | 534 |
| 695 | D37920_at | Q14534 | 128 | 535 |
| 696 | L13606_at | XP_028522* | 129 | 536 |
| 697 | AF030089UTR#1_at | O15075 | 130 | 537 |
| 698 | M83298_g_at | AAH41071 | 132 | 538 |
| 699 | M83676_at | O88386 | 133 | 539 |
| 700 | M84176_at | NP_002469* | 134 | 540 |
| 701 | M86621_at | P54289 | 135 | 541 |
| 702 | M89945mRNA_g_at | NP_004453 | 136 | 542 |
| 703 | rc_AA799571_at | Q9BXS4 | 137 | 543 |
| 704 | L08505_at | BAA20783 | 138 | 544 |
| 705 | rc_AA800221_at | Q9UHP9* | 139 | 545 |
| 706 | M57263_at | AAH34699 | 140 | 546 |
| 707 | rc_AA817975_at | Q9Y277 | 145 | 547 |
| 708 | rc_AA818745_at | Q01484 | 146 | 548 |
| 709 | M21759mRNA_at | XP_048104 | 148 | 549 |
| 710 | L24897_s_at | XP_028522* | 149 | 550 |
| 711 | L27124_s_at | O43847 | 150 | 551 |
| 712 | L28818cds_at | AAH46391 | 151 | 552 |
| 713 | M10140_at | P06732* | 152 | 553 |
| 714 | M16112_at | AAH19070 | 154 | 554 |
| 715 | M63122_at | P19438 | 155 | 555 |
| 716 | M18330_at | AAH43350 | 156 | 556 |
| 717 | M62752_at | Q05639 | 157 | 557 |
| 718 | M23995_g_at | NP_000683 | 158 | 558 |
| 719 | M32397_at | P15309 | 160 | 559 |
| 720 | M37941mRNA_s_at | P23109 | 161 | 560 |
| 721 | M37942exon#2-3_s_at | NP_000027 | 162 | 561 |
| 722 | M55534mRNA_s_at | P02511 | 163 | 562 |
| 723 | M16112_g_at | AAH19070 | 165 | 563 |
| 724 | rc_AI232024_f_at | O60661* | 166 | 564 |
| 725 | rc_AI180442_at | P14324 | 168 | 565 |
| 726 | rc_AI227677_at | P46934 | 169 | 566 |
| 727 | rc_AI230247_s_at | P49908 | 170 | 567 |
| 728 | rc_AI230319_at | AAH23620 | 171 | 568 |
| 729 | rc_AI237371_at | O95413 | 177 | 569 |
| 730 | rc_AI171376_at | Q9UHP9* | 181 | 570 |
| 731 | rc_AI172006_at | NP_115856 | 186 | 571 |
| 732 | rc_AI179243_at | AAA52334 | 190 | 572 |
| 733 | rc_AI178921_s_at | P14735 | 192 | 573 |
| 734 | rc_AI175539_at | P20472* | 195 | 574 |
| 735 | rc_AI175935_at | Q12965* | 196 | 575 |
| 736 | rc_AI176584_at | P24593 | 197 | 576 |
| 737 | rc_AI178559_at | P51959 | 198 | 577 |
| 738 | rc_AI639233_s_at | P07585 | 199 | 578 |
| 739 | X70871_at | P51959 | 201 | 579 |
| 740 | X52311_at | AAH32446 | 202 | 580 |
| 741 | X56133_at | P25705* | 205 | 581 |
| 742 | X60351cds_s_at | P02511 | 206 | 582 |
| 743 | X64401cds_s_at | AAH03642 | 207 | 583 |
| 744 | X70369_s_at | AAB59383 | 209 | 584 |
| 745 | X04267_at | P11055* | 210 | 585 |
| 746 | X74835cds_at | Q07001 | 211 | 586 |
| 747 | X76489cds_g_at | P21926 | 212 | 587 |
| 748 | X78848cds_f_at | Q16772 | 213 | 588 |
| 749 | X80130cds_f_at | AAH009987* | 214 | 589 |
| 750 | Z78279_g_at | P02452 | 215 | 590 |
| 751 | Z83869cds_at | Q15449 | 216 | 591 |
| 752 | X64827cds_s_at | P10176* | 217 | 592 |
| 753 | U20195_s_at | AAH19920 | 218 | 593 |
| 754 | rc_AI639324_at | NP_110420.1 | 219 | 594 |
| 755 | rc_AI639465_f_at | Q969Q1* | 222 | 595 |
| 756 | rc_H33725_at | O95630 | 224 | 596 |
| 757 | X15939_f_at | P12883* | 225 | 597 |
| 758 | S74265_s_at | P11137 | 226 | 598 |
| 759 | X12554cds_s_at | AAH29818 | 227 | 599 |
| 760 | U25651_at | AAH12799* | 228 | 600 |
| 761 | U30938_at | P11137 | 229 | 601 |
| 762 | U40836mRNA_s_at | P10176 | 230 | 602 |
| 763 | U50736_s_at | Q15327 | 231 | 603 |
| 764 | U84727_at | Q02978 | 232 | 604 |
| 765 | U96130_at | P46976 | 233 | 605 |
| 766 | S49760_at | S12969 | 235 | 606 |
| 767 | rc_AI010583_at | Q08043 | 237 | 607 |
| 768 | rc_AI011709_at | Q15155 | 241 | 608 |
| 769 | rc_AA996612_at | Q96DL0 | 245 | 609 |
| 770 | rc_AA925122_at | TPHUCC | 255 | 610 |
| 771 | rc_AA925664_at | A32342 | 257 | 611 |
| 772 | rc_AA944560_at | Q9Y2B9 | 259 | 612 |
| 773 | rc_AA997341_at | O60705 | 262 | 613 |
| 774 | rc_AA946108_at | A55347 | 270 | 614 |
| 775 | rc_AI168935_at | NP_060756.1 | 271 | 615 |
| 776 | rc_AI104924_f_at | O60661* | 272 | 616 |
| 777 | rc_AI059955_s_at | CAD28496 | 273 | 617 |
| 778 | rc_AI145367_at | P40123 | 279 | 618 |
| 779 | rc_AI170777_at | Q8TAQ6 | 282 | 619 |
| 780 | rc_AI170777_g_at | Q8TAQ6 | 283 | 620 |
| 781 | rc_AI170894_at | NP_001113.1 | 285 | 621 |
| 782 | rc_AI170985_at | AAH05318* | 286 | 622 |
| 783 | rc_AI103376_at | NP_060582.1 | 289 | 623 |
| 784 | rc_AI071299_at | O75411 | 290 | 624 |
| 785 | rc_AI111401_s_at | O95172 | 295 | 625 |
| 786 | rc_AI102103_g_at | O15096 | 296 | 626 |
| 787 | rc_AI103473_at | Q9NR55 | 297 | 627 |
| 788 | rc_AI103920_f_at | O60661* | 299 | 628 |
| 789 | rc_AI104354_at | NP_057683.1 | 303 | 629 |
| 790 | rc_AI104567_g_at | AAH009987* | 305 | 630 |

*Muscle-specific

[0104] TABLE 6
Rat DNA SMNs

| SEQ | | | Table 2 |
|---|---|---|---|
| ID | | Accession | SEQ |
| NO: | AffyID ™ | Number | ID NO: |
| 791 | rc_AA946094_at | NM_021588 | 2 |
| 792 | rc_AA891522_f_at | NM_017240* | 3 |
| 793 | rc_AA799471_at | AA799471 | 4 |
| 794 | rc_AI172339_at | NM_175844 | 5 |
| 795 | M24393_at | NM_017115* | 7 |
| 796 | X07314cds_at | X07314* | 11 |
| 797 | rc_AA799396_at | AA799396 | 13 |
| 798 | rc_AI012182_s_at | NM_033234 | 15 |
| 799 | rc_AA818804_at | AA818804 | 18 |
| 800 | M12098_s_at | NM_012604* | 20 |
| 801 | M27151_at | NM_013172* | 22 |
| 802 | rc_AI227690_at | AI227690 | 23 |
| 803 | rc_AI175100_at | AI175100 | 24 |
| 804 | AF077338_at | NM_031813* | 25 |
| 805 | X74832cds_at | NM_024485* | 26 |
| 806 | AA108284_at | NM_019292* | 29 |
| 807 | rc_AI104913_at | NM_013044* | 30 |
| 808 | rc_AA818120_at | AA818120 | 31 |
| 809 | X59864mRNA_at | X59864 | 32 |
| 810 | AF039832_g_at | NM_019334 | 33 |
| 811 | X15939_i_at | NM_017240* | 34 |
| 812 | rc_AA851497_f_at | AA851497 | 35 |
| 813 | X14812_at | NM_012606* | 37 |
| 814 | X15939_r_at | NM_017240* | 39 |
| 815 | rc_AI170696_at | NM_133583 | 51 |
| 816 | rc_AA892801_at | NM_017245 | 61 |
| 817 | rc_AA875288_at | AA875288 | 62 |
| 818 | rc_AA891938_at | AA891938 | 65 |
| 819 | rc_AA892287_at | AA892287 | 66 |
| 820 | rc_AA892313_at | AA892313 | 67 |
| 821 | rc_AA892468_g_at | NM_138836 | 69 |
| 822 | rc_AA859829_g_at | AA859829 | 70 |
| 823 | rc_AA892860_g_at | AA892860 | 71 |
| 824 | rc_AA893307_at | AA893307 | 75 |
| 825 | rc_AA894101 g_at | AA894101 | 76 |
| 826 | Z78279_at | Z78279 | 81 |
| 827 | rc_AI172054_at | AI172054 | 82 |
| 828 | rc_AA875206_at | NM_053747 | 85 |
| 829 | rc_AI172189_at | AI172189 | 86 |
| 830 | rc_AA859931_g_at | AA859931 | 87 |
| 831 | rc_AA858921_at | AA858921 | 92 |
| 832 | rc_AA859335_at | NM_017147* | 93 |
| 833 | H32169_at | H32169 | 97 |
| 834 | J01435cds#8_s_at | J01435 | 100 |
| 835 | J01436cds_s_at | J01436 | 101 |
| 836 | J04993_at | NM_017184* | 102 |
| 837 | L11694_at | NM_017033 | 103 |
| 838 | D38056_at | NM_053599 | 105 |
| 839 | L01702_at | NM_012763 | 108 |
| 840 | AB009999_g_at | NM_031242 | 116 |
| 841 | AF008439_at | NM_013173 | 118 |
| 842 | AF037072_at | NM_019292* | 121 |
| 843 | D64046_at | NM_022185 | 122 |
| 844 | AF077338_g_at | NM_031813* | 124 |
| 845 | AF080507_at | AF080507 | 125 |
| 846 | D37920_at | NM_017136 | 128 |
| 847 | M83298_g_at | NM_053999 | 132 |
| 848 | M83676_at | M83676 | 133 |
| 849 | rc_AA799571_at | AA799571 | 137 |
| 850 | M57263_at | NM_031659 | 140 |
| 851 | rc_AA817975_at | NM_031355 | 145 |
| 852 | rc_AA818745_at | AA818745 | 146 |
| 853 | L27124_s_at | NM_012993 | 150 |
| 854 | M18330_at | NM_133307 | 156 |
| 855 | M32397_at | NM_020072 | 160 |
| 856 | rc_AI227677_at | AI227677 | 169 |
| 857 | rc_AI230247_s_at | NM_019192 | 170 |
| 858 | rc_AI230596_at | AI230596 | 172 |
| 859 | rc_AI638960_at | AI638960 | 179 |
| 860 | rc_AI171376_at | NM_053395* | 181 |
| 861 | rc_AI172423_at | NM_181368 | 187 |
| 862 | rc_AI178921_s_at | NM_013159 | 192 |
| 863 | rc_AI175935_at | NM_173101* | 196 |
| 864 | rc_AI176584_at | NM_012817 | 197 |
| 865 | X52311_at | NM_054006 | 202 |
| 866 | X53504cds_g_at | X53504 | 204 |
| 867 | X64401cds_s_at | NM_173144 | 207 |
| 868 | X76489cds_g_at | X76489 | 212 |
| 869 | Z78279_g_at | Z78279 | 215 |
| 870 | Z83869cds_at | NM_021699 | 216 |
| 871 | X64827cds_s_at | NM_012786* | 217 |
| 872 | rc_AI639324_at | AI639324 | 219 |
| 873 | rc_AI639410_i_at | AI639410 | 220 |
| 874 | rc_AI639465_f_at | NM_080903* | 222 |
| 875 | rc_H33725_at | NM_138531 | 224 |
| 876 | X12554cds_s_at | NM_012812 | 227 |
| 877 | U30938_at | NM_013066 | 229 |
| 878 | U40836mRNA_s_at | NM_012786 | 230 |
| 879 | S49760_at | NM_080787 | 235 |
| 880 | rc_AI011709_at | AI011709 | 241 |
| 881 | rc_AI043640_at | AI043640 | 248 |
| 882 | rc_AI044292_s_at | AI044292 | 249 |
| 883 | rc_AA925122_at | AA925122 | 255 |
| 884 | rc_AA925664_at | AA925664 | 257 |
| 885 | rc_AA946108_at | NM_173306 | 270 |
| 886 | rc_AI168935_at | AI168935 | 271 |
| 887 | rc_AA924428_at | AA924428 | 278 |
| 888 | rc_AI170894_at | AI170894 | 285 |
| 889 | rc_AI103376_at | AI103376 | 289 |
| 890 | rc_AI071299_at | NM_031135 | 290 |
| 891 | rc_AI072166_at | AI072166 | 293 |
| 892 | rc_AI111401_s_at | AI111401 | 295 |
| 893 | rc_AI103507_at | AI103507 | 298 |
| 894 | rc_AI104349_at | AI104349 | 302 |
| 895 | rc_AI104354_at | AI104354 | 303 |
| 896 | rc_AA892861_at | AA892861 | 306 |
| 897 | rc_AI179358_at | AI179358 | 307 |

*Muscle-specific

[0105] TABLE 7
Rat Protein SMPs

| SEQ | | | | |
|---|---|---|---|---|
| ID | | Accession | Table 6 | Table 3 |
| NO: | AffyID ™ | Number | SEQ ID NO: | SEQ ID NO: |
| 898 | rc_AA946094_at | Q9QZ76 | 2 | 791 |
| 899 | rc_AA891522_f_at | P02564* | 3 | 792 |
| 900 | rc_AI172339_at | Q8K4K7 | 5 | 794 |
| 901 | M24393_at | P20428* | 7 | 795 |
| 902 | X07314cds_at | P08733* | 11 | 796 |
| 903 | rc_AI012182_s_at | P02091 | 15 | 798 |
| 904 | M12098_s_at | Q9QZV8* | 20 | 800 |
| 905 | M27151_at | P19335* | 22 | 801 |
| 906 | AF077338_at | O88599* | 25 | 804 |
| 907 | X74832cds_at | P25108* | 26 | 805 |
| 908 | AA108284_at | P14141* | 29 | 806 |
| 909 | rc_AI104913_at | P70567* | 30 | 807 |
| 910 | X59864mRNA_at | Q03668** | 32 | 809 |
| 911 | AF039832_g_at | Q9R0W1 | 33 | 810 |
| 912 | X15939_i_at | P02564* | 34 | 811 |
| 913 | X14812_at | P16409* | 37 | 813 |
| 914 | X15939_r_at | P02564* | 39 | 814 |
| 915 | rc_AI170696_at | Q8VBU2 | 51 | 815 |
| 916 | rc_AA892801_at | P05197 | 61 | 816 |
| 917 | rc_AA892468_g_at | Q9ES87 | 69 | 821 |
| 918 | Z78279_at | Q63079 | 81 | 826 |
| 919 | rc_AA875206_at | Q9JJP9 | 85 | 828 |
| 920 | rc_AA859335_at | P45592* | 93 | 832 |
| 921 | J01436cds_s_at | AAA99907 | 101 | 835 |
| 922 | J04993_at | P13413* | 102 | 836 |
| 923 | L11694_at | P38652 | 103 | 837 |
| 924 | D38056_at | P97553 | 105 | 838 |
| 925 | L01702_at | Q03348 | 108 | 839 |
| 926 | AB009999_g_at | O35052 | 116 | 840 |
| 927 | AF008439_at | O54902 | 118 | 841 |
| 928 | AF037072_at | P14141* | 121 | 842 |
| 929 | D64046_at | Q63788 | 122 | 843 |
| 930 | AF077338_g_at | O88599* | 124 | 844 |
| 931 | D37920_at | P52020 | 128 | 846 |
| 932 | M83298_g_at | P36876 | 132 | 847 |
| 933 | M83676_at | P35284 | 133 | 848 |
| 934 | M57263_at | P23606 | 140 | 850 |
| 935 | rc_AA817975_at | Q9R1Z0 | 145 | 851 |
| 936 | L27124_s_at | 25499 | 150 | 853 |
| 937 | M18330_at | 170538 | 156 | 854 |
| 938 | M32397_at | P20646 | 160 | 855 |
| 939 | rc_AI227677_at | Q62940 | 169 | 856 |
| 940 | rc_AI230247_s_at | P25236 | 170 | 857 |
| 941 | rc_AI171376_at | Q925F0* | 181 | 860 |
| 942 | rc_AI172423_at | AAP12535 | 187 | 861 |
| 943 | rc_AI178921_s_at | P35559 | 192 | 862 |
| 944 | rc_AI175935_at | Q63356* | 196 | 863 |
| 945 | rc_AI176584_at | P24594 | 197 | 864 |
| 946 | X52311_at | P18395 | 202 | 865 |
| 947 | X53504cds_g_at | P23358 | 204 | 866 |
| 948 | X64401cds_s_at | P04800 | 207 | 867 |
| 949 | X76489cds_g_at | P40241 | 212 | 868 |
| 950 | Z78279_g_at | Q63079 | 215 | 869 |
| 951 | Z83869cds_at | O08679 | 216 | 870 |
| 952 | X64827cds_s_at | P16221* | 217 | 871 |
| 953 | rc_AI639465_f_at | Q91Z63* | 222 | 874 |
| 954 | rc_H33725_at | Q8R424 | 224 | 875 |
| 955 | X12554cds_s_at | P10817 | 227 | 876 |
| 956 | U30938_at | P15146 | 229 | 877 |
| 957 | U40836mRNA_s_at | P16221 | 230 | 878 |
| 958 | S49760_at | 140866 | 235 | 879 |
| 959 | rc_AA925664_at | O08813 | 257 | 884 |
| 960 | rc_AA946108_at | P70570 | 270 | 885 |
| 961 | rc_AI071299_at | O08876 | 290 | 890 |
| 962 | rc_AI111401_s_at | O35217 | 295 | 892 |

*Muscle-specific
**SPTREMBL

[0106] TABLE 8
Human DNA SMNs

| | | | Table 6 | Table 4 |
|---|---|---|---|---|
| SEQ ID | | | SEQ ID | SEQ ID |
| NO: | AffyID ™ | Accession Number | NO: | NO: |
| 963 | rc_AA946094_at | NM_005368.1 | 2 | 791 |
| 964 | rc_AA891522_f_at | NM_000257.1* | 3 | 792 |
| 965 | rc_AA799471_at | 2330600 | 4 | 793 |
| 966 | M24393_at | NM_002479.2* | 7 | 795 |
| 967 | rc_AI012182_s_at | NM_000518.4 | 15 | 798 |
| 968 | rc_AA818804_at | 7022045 | 18 | 799 |
| 969 | M12098_s_at | NM_002470.1* | 20 | 800 |
| 970 | M27151_at | NM_002469.1* | 22 | 801 |
| 971 | AF077338_at | NM_004997.1* | 25 | 804 |
| 972 | X74832cds_at | NM_000079.1* | 26 | 805 |
| 973 | AA108284_at | NM_005181.2* | 29 | 806 |
| 974 | rc_AI104913_at | NM_003275.1* | 30 | 807 |
| 975 | rc_AA818120_at | 1943766 | 31 | 808 |
| 976 | AF039832_g_at | NM_000325.3 | 33 | 810 |
| 977 | X15939_i_at | NM_000257.1* | 34 | 811 |
| 978 | X14812_at | NM_000258.1* | 37 | 813 |
| 979 | X15939_r_at | NM_000257.1* | 39 | 814 |
| 980 | rc_AI170696_at | NM_016250.1 | 51 | 815 |
| 981 | rc_AA892801_at | NM_001961.2 | 61 | 816 |
| 982 | rc_AA892287_at | NM_018653 | 66 | 819 |
| 983 | rc_AA892313_at | NM_003193 | 67 | 820 |
| 984 | rc_AA892468_g_at | NM_002773.2 | 69 | 821 |
| 985 | rc_AA859829_g_at | NM_005882 | 70 | 822 |
| 986 | Z78279_at | BC036531 | 81 | 826 |
| 987 | rc_AA875206_at | 222989_s_at | 85 | 828 |
| 988 | rc_AA859931_g_at | NM_024069 | 87 | 830 |
| 989 | rc_AA859335_at | NM_005507.1* | 93 | 832 |
| 990 | H32169_at | BC018256 | 97 | 833 |
| 991 | J04993_at | NM_003281.2* | 102 | 836 |
| 992 | L11694_at | NM_002633.2 | 103 | 837 |
| 993 | D38056_at | NM_004428.2 | 105 | 838 |
| 994 | L01702_at | NM_002836.2 | 108 | 839 |
| 995 | AB009999_g_at | NM_001263.2 | 116 | 840 |
| 996 | AF008439_at | NM_000617.1 | 118 | 841 |
| 997 | AF037072_at | NM_005181.2* | 121 | 842 |
| 998 | D64046_at | NM_005027.1 | 122 | 843 |
| 999 | AF077338_g_at | NM_004997.1* | 124 | 844 |
| 1000 | D37920_at | NM_003129.2 | 128 | 846 |
| 1001 | M83298_g_at | NM_002717.2 | 132 | 847 |
| 1002 | M83676_at | 5410327 | 133 | 848 |
| 1003 | rc_AA799571_at | 13491977 | 137 | 849 |
| 1004 | M57263_at | NM_000359.1 | 140 | 850 |
| 1005 | rc_AA817975_at | NM_005662.3 | 145 | 851 |
| 1006 | rc_AA818745_at | 29488 | 146 | 852 |
| 1007 | L27124_s_at | NM_002525.1 | 150 | 853 |
| 1008 | M18330_at | NM_006254.2 | 156 | 854 |
| 1009 | M32397_at | NM_001099.2 | 160 | 855 |
| 1010 | rc_AI227677_at | D42055.1 | 169 | 856 |
| 1011 | rc_AI230247_s_at | NM_005410.1 | 170 | 857 |
| 1012 | rc_AI171376_at | NM_014332.1* | 181 | 860 |
| 1013 | rc_AI178921_s_at | NM_004969.1 | 192 | 862 |
| 1014 | rc_AI175935_at | NM_004998.1* | 196 | 863 |
| 1015 | rc_AI176584_at | NM_000599.1 | 197 | 864 |
| 1016 | X52311_at | NM_002524.2 | 202 | 865 |
| 1017 | X64401cds_s_at | BC003642 | 207 | 867 |
| 1018 | X76489cds_g_at | NM_001769.2 | 212 | 868 |
| 1019 | Z78279_g_at | BC036531 | 215 | 869 |
| 1020 | Z83869cds_at | NM_004954.2 | 216 | 870 |
| 1021 | X64827cds_s_at | J04823* | 217 | 871 |
| 1022 | rc_AI639324_at | NM_030793 | 219 | 872 |
| 1023 | rc_AI639465_f_at | NM_032588.2* | 222 | 874 |
| 1024 | rc_H33725_at | NM_006463.2 | 224 | 875 |
| 1025 | X12554cds_s_at | NM_005205.2 | 227 | 876 |
| 1026 | U30938_at | NM_002374.2 | 229 | 877 |
| 1027 | U40836mRNA_s_at | 1311703 | 230 | 878 |
| 1028 | S49760_at | BC043292 | 235 | 879 |
| 1029 | rc_AI011709_at | 35526 | 241 | 880 |
| 1030 | rc_AA925122_at | NM_000363 | 255 | 883 |
| 1031 | rc_AA925664_at | NM_001664 | 257 | 884 |
| 1032 | rc_AA946108_at | NM_173306 | 270 | 885 |
| 1033 | rc_AI168935_at | NM_018286 | 271 | 886 |
| 1034 | rc_AI170894_at | NM_001122 | 285 | 888 |
| 1035 | rc_AI103376_at | NM_018112 | 289 | 889 |
| 1036 | rc_AI071299_at | NM_005655.1 | 290 | 890 |
| 1037 | rc_AI111401_s_at | NM_004897.2 | 295 | 892 |
| 1038 | rc_AI104354_at | NM_016599 | 303 | 895 |

*Muscle-specific

[0107] TABLE 9
Human Protein SMNs

| | | | Table 8 | |
|---|---|---|---|---|
| SEQ ID | | Accession | SEQ ID | Table 5 |
| NO: | AffyID ™ | Number | NO: | SEQ ID NO: |
| 1039 | rc_AA946094_at | P02144 | 2 | 963 |
| 1040 | rc_AA891522_f_at | P12883* | 3 | 964 |
| 1041 | rc_AA799471_at | O15273 | 4 | 965 |
| 1042 | M24393_at | P15173* | 7 | 966 |
| 1043 | rc_AI012182_s_at | P02023 | 15 | 967 |
| 1044 | rc_AA818804_at | Q9NWB1 | 18 | 968 |
| 1045 | M12098_s_at | P11055* | 20 | 969 |
| 1046 | M27151_at | AAH17834* | 22 | 970 |
| 1047 | AF077338_at | AAH44226* | 25 | 971 |
| 1048 | X74832cds_at | P02708* | 26 | 972 |
| 1049 | AA108284_at | P07451* | 29 | 973 |
| 1050 | rc_AI104913_at | P28289* | 30 | 974 |
| 1051 | rc_AA818120_at | O00631 | 31 | 975 |
| 1052 | AF039832_g_at | Q99697 | 33 | 976 |
| 1053 | X15939_i_at | P12883* | 34 | 977 |
| 1054 | X14812_at | AAH09790* | 37 | 978 |
| 1055 | X15939_r_at | P12883* | 39 | 979 |
| 1056 | rc_AI170696_at | CAD62321 | 51 | 980 |
| 1057 | rc_AA892801_at | P13639 | 61 | 981 |
| 1058 | rc_AA892287_at | NP_061123.2 | 66 | 982 |
| 1059 | rc_AA892313_at | NP_003184.1 | 67 | 983 |
| 1060 | rc_AA892468_g_at | Q16651 | 69 | 984 |
| 1061 | rc_AA859829_g_at | NP_005873.1 | 70 | 985 |
| 1062 | Z78279_at | P02452 | 81 | 986 |
| 1063 | rc_AA875206_at | NP_038466.2 | 85 | 987 |
| 1064 | rc_AA859931_g_at | NP_076974.1 | 87 | 988 |
| 1065 | rc_AA859335_at | P23528* | 93 | 989 |
| 1066 | H32169_at | NP_068733.1 | 97 | 990 |
| 1067 | J04993_at | AAH12600* | 102 | 991 |
| 1068 | L11694_at | AAH19920 | 103 | 992 |
| 1069 | D38056_at | P20827 | 105 | 993 |
| 1070 | L01702_at | AAH27308 | 108 | 994 |
| 1071 | AB009999_g_at | Q92903 | 116 | 995 |
| 1072 | AF008439_at | BAB93467 | 118 | 996 |
| 1073 | AF037072_at | P07451* | 121 | 997 |
| 1074 | D64046_at | O00459 | 122 | 998 |
| 1075 | AF077338_g_at | AAH44226* | 124 | 999 |
| 1076 | D37920_at | Q14534 | 128 | 1000 |
| 1077 | M83298_g_at | AAH41071 | 132 | 1001 |
| 1078 | M83676_at | O88386 | 133 | 1002 |
| 1079 | rc_AA799571_at | Q9BXS4 | 137 | 1003 |
| 1080 | M57263_at | AAH34699 | 140 | 1004 |
| 1081 | rc_AA817975_at | Q9Y277 | 145 | 1005 |
| 1082 | rc_AA818745_at | Q01484 | 146 | 1006 |
| 1083 | L27124_s_at | O43847 | 150 | 1007 |
| 1084 | M18330_at | AAH43350 | 156 | 1008 |
| 1085 | M32397_at | P15309 | 160 | 1009 |
| 1086 | rc_AI227677_at | P46934 | 169 | 1010 |
| 1087 | rc_AI230247_s_at | P49908 | 170 | 1011 |
| 1088 | rc_AI171376_at | Q9UHP9* | 181 | 1012 |
| 1089 | rc_AI178921_s_at | P14735 | 192 | 1013 |
| 1090 | rc_AI175935_at | Q12965* | 196 | 1014 |
| 1091 | rc_AI176584_at | P24593 | 197 | 1015 |
| 1092 | X52311_at | AAH32446 | 202 | 1016 |
| 1093 | X64401cds_s_at | AAH03642 | 207 | 1017 |
| 1094 | X76489cds_g_at | P21926 | 212 | 1018 |
| 1095 | Z78279_g_at | P02452 | 215 | 1019 |
| 1096 | Z83869cds_at | Q15449 | 216 | 1020 |
| 1097 | X64827cds_s_at | P10176* | 217 | 1021 |
| 1098 | rc_AI639324_at | NP_110420.1 | 219 | 1022 |
| 1099 | rc_AI639465_f_at | Q969Q1* | 222 | 1023 |
| 1100 | rc_H33725_at | O95630 | 224 | 1024 |
| 1101 | X12554cds_s_at | AAH29818 | 227 | 1025 |
| 1102 | U30938_at | P11137 | 229 | 1026 |
| 1103 | U40836mRNA_s_at | P10176 | 230 | 1027 |
| 1104 | S49760_at | S12969 | 235 | 1028 |
| 1105 | rc_AI011709_at | Q15155 | 241 | 1029 |
| 1106 | rc_AA925122_at | TPHUCC | 255 | 1030 |
| 1107 | rc_AA925664_at | A32342 | 257 | 1031 |
| 1108 | rc_AA946108_at | A55347 | 270 | 1032 |
| 1109 | rc_AI168935_at | NP_060756.1 | 271 | 1033 |
| 1110 | rc_AI170894_at | NP_001113.1 | 285 | 1034 |
| 1111 | rc_AI103376_at | NP_060582.1 | 289 | 1035 |
| 1112 | rc_AI071299_at | O75411 | 290 | 1036 |
| 1113 | rc_AI111401_s_at | O95172 | 295 | 1037 |
| 1114 | rc_AI104354_at | NP_057683.1 | 303 | 1038 |

*Muscle-specific

[0108] TABLE 10
Rat DNA BMNs

| SEQ | | | Table 2 |
|---|---|---|---|
| ID | | Accession | SEQ |
| NO: | AffyID ™ | Number | ID NO: |
| 1115 | rc_AI233261_i_at | NM_017305 | N/A |
| 1116 | rc_AI012354_at | NM_022647 | N/A |
| 1117 | rc_AA955974_at | AA955974 | N/A |
| 1118 | rc_AI072712_at | AI072712 | N/A |
| 1119 | rc_AI029088_at | AI029088 | N/A |
| 1120 | X15939_i_at | NM_017240* | 34 |
| 1121 | rc_AA850730_at | AA850730 | N/A |
| 1122 | rc_AA998245_at | AA998245 | N/A |
| 1123 | rc_AI233173_at | NM_138548 | N/A |
| 1124 | rc_AI232350_f_at | AI232350 | N/A |
| 1125 | rc_AA998683_at | NM_031970 | N/A |
| 1126 | rc_AA858921_at | AA858921 | 92 |
| 1127 | rc_AA850705_at | NM_153309 | N/A |
| 1128 | rc_AA998097_at | AA998097 | N/A |
| 1129 | rc_AA997841_at | NM_133298 | N/A |
| 1130 | rc_AA848449_at | AA848449 | N/A |
| 1131 | rc_AA819268_at | AA819268 | N/A |
| 1132 | rc_AA800268_at | AA800268 | N/A |
| 1133 | M14050_s_at | NM_013083 | N/A |
| 1134 | L06804_at | L06804 | N/A |
| 1135 | D12769_at | NM_057211 | N/A |
| 1136 | AF036335_g_at | AF036335 | N/A |
| 1137 | AA801076_at | AA801076 | N/A |
| 1138 | rc_AA848829_at | AA848829 | N/A |
| 1139 | rc_AI030259_at | AI030259 | N/A |
| 1140 | S69316_s_at | S69316 | N/A |
| 1141 | rc_AI639155_at | AI639155 | N/A |
| 1142 | rc_AI639012_at | AI639012 | N/A |
| 1143 | rc_AI237654_at | AI237654 | N/A |
| 1144 | rc_AI228696_at | AI228696 | N/A |
| 1145 | rc_AI177055_at | AI177055 | N/A |
| 1146 | rc_AI176969_at | AI176969 | N/A |
| 1147 | rc_AI102438_at | AI102438 | N/A |
| 1148 | rc_AI072603_at | AI072603 | N/A |
| 1149 | rc_AI059519_at | AI059519 | N/A |
| 1150 | rc_AA899491_at | AA899491 | N/A |
| 1151 | rc_AI044635_at | AI044635 | N/A |
| 1152 | rc_AA874873_g_at | AA874873 | N/A |
| 1153 | rc_AI014091_at | NM_053698 | N/A |
| 1154 | rc_AI013854_at | AI013854 | N/A |
| 1155 | rc_AI012937_at | AI012937 | N/A |
| 1156 | rc_AI008911_at | AI008911 | N/A |
| 1157 | rc_AI007875_at | NM_053435 | N/A |
| 1158 | rc_AI007672_at | AI007672 | N/A |
| 1159 | rc_AA997726_at | AA997726 | N/A |
| 1160 | rc_AA963457_at | AA963457 | N/A |
| 1161 | rc_AA963171_at | AA963171 | N/A |
| 1162 | rc_AA924573_s_at | AA924573 | N/A |
| 1163 | rc_AI058912_at | AI058912 | N/A |

[0109] TABLE 11
Rat Protein BMNs

| SEQ ID | | Accession | Table 10 | Table 2 |
|---|---|---|---|---|
| NO: | AffyID ™ | Number | SEQ ID NO: | SEQ ID NO: |
| 1164 | rc_AI233261_i_at | P48508 | 1115 | N/A |
| 1165 | rc_AI012354_at | 64647 | 1116 | N/A |
| 1166 | X15939_i_at | P02564* | 1120 | 34 |
| 1167 | rc_AI233173_at | Q05982 | 1123 | N/A |
| 1168 | rc_AA998683_at | P42930 | 1125 | N/A |
| 1169 | rc_AA850705_at | Q8CFC1 | 1127 | N/A |
| 1170 | rc_AA997841_at | Q9QZF6 | 1129 | N/A |
| 1171 | M14050_s_at | P06761 | 1133 | N/A |
| 1172 | L06804_at | P36198 | 1134 | N/A |
| 1173 | D12769_at | Q01713 | 1135 | N/A |
| 1174 | AF036335_g_at | O54725 | 1136 | N/A |
| 1175 | S69316_s_at | S69316 | 1140 | N/A |
| 1176 | rc_AI237654_at | 117514 | 1143 | N/A |
| 1177 | rc_AI014091_at | Q99MA1 | 1153 | N/A |
| 1178 | rc_AI007875_at | Q9ESZ0 | 1157 | N/A |

*Muscle-specific

[0110] TABLE 12
Human DNA BMNs

| | | | | Table 4 |
|---|---|---|---|---|
| SEQ ID | | Accession | Table 10 | SEQ ID |
| NO: | AffyID ™ | Number | SEQ ID NO: | NO: |
| 1179 | rc_AI233261_i_at | NM_002061.1 | 1115 | N/A |
| 1180 | rc_AI012354_at | NM_022647 | 1116 | N/A |
| 1181 | rc_AA955974_at | NM_001851 | 1117 | N/A |
| 1182 | X15939_i_at | NM_000257.1* | 1120 | 490 |
| 1183 | rc_AA850730_at | 505095 | 1121 | N/A |
| 1184 | rc_AI233173_at | NM_000269.1 | 1123 | N/A |
| 1185 | rc_AA998683_at | NM_031970 | 1125 | N/A |
| 1186 | rc_AA850705_at | 213189_at | 1127 | N/A |
| 1187 | rc_AA998097_at | 1000283 | 1128 | N/A |
| 1188 | rc_AA997841_at | NM_002510.1 | 1129 | N/A |
| 1189 | rc_AA800268_at | NM_014182 | 1132 | N/A |
| 1190 | M14050_s_at | NM_005347.2 | 1133 | N/A |
| 1191 | L06804_at | 600494 | 1134 | N/A |
| 1192 | D12769_at | NM_001206.1 | 1135 | N/A |
| 1193 | AF036335_g_at | NM_005066.1 | 1136 | N/A |
| 1194 | rc_AI030259_at | NM_031219 | 1139 | N/A |
| 1195 | rc_AI639012_at | NM_024042 | 1142 | N/A |
| 1196 | rc_AI237654_at | NM_006472.1 | 1143 | N/A |
| 1197 | rc_AI228696_at | NM_012106 | 1144 | N/A |
| 1198 | rc_AI177055_at | NM_053050 | 1145 | N/A |
| 1199 | rc_AI059519_at | NM_024324 | 1149 | N/A |
| 1200 | rc_AA899491_at | XM_291885 | 1150 | N/A |
| 1201 | rc_AI044635_at | NM_014934 | 1151 | N/A |
| 1202 | rc_AI014091_at | NM_006079.2 | 1153 | N/A |
| 1203 | rc_AI012937_at | NM_013442 | 1155 | N/A |
| 1204 | rc_AI008911_at | NM_012470 | 1156 | N/A |
| 1205 | rc_AI007875_at | 203655_at | 1157 | N/A |
| 1206 | rc_AA997726_at | 1136429 | 1159 | N/A |
| 1207 | rc_AA963171_at | NM_031210 | 1161 | N/A |

*Muscle-specific

[0111] TABLE 13
Human Protein BMNs

| SEQ | | | Table 12 | |
|---|---|---|---|---|
| ID | | Accession | SEQ ID | Table 5 |
| NO: | AffyID ™ | Number | NO: | sSEQ ID NO: |
| 1208 | rc_AI233261_i_at | AAH41809 | 1115 | 1179 |
| 1209 | rc_AI012354_at | E40335 | 1116 | 1180 |
| 1210 | rc_AA955974_at | NP_001842.2 | 1117 | 1181 |
| 1211 | X15939_i_at | P12883* | 1120 | 1182 |
| 1212 | rc_AA850730_at | Q15040 | 1121 | 1183 |
| 1213 | rc_AI233173_at | P15531 | 1123 | 1184 |
| 1214 | rc_AA998683_at | HHHU27 | 1125 | 1185 |
| 1215 | rc_AA850705_at | NP_116167.1 | 1127 | 1186 |
| 1216 | rc_AA998097_at | P49903 | 1128 | 1187 |
| 1217 | rc_AA997841_at | Q14956 | 1129 | 1188 |
| 1218 | rc_AA800268_at | NP_054901.1 | 1132 | 1189 |
| 1219 | M14050_s_at | AAH20235 | 1133 | 1190 |
| 1220 | L06804_at | P50458 | 1134 | 1191 |
| 1221 | D12769_at | Q13886 | 1135 | 1192 |
| 1222 | AF036335_g_at | P23246 | 1136 | 1193 |
| 1223 | rc_AI030259_at | NP_112496.1 | 1139 | 1194 |
| 1224 | rc_AI639012_at | NP_076947.1 | 1142 | 1195 |
| 1225 | rc_AI237654_at | Q16226 | 1143 | 1196 |
| 1226 | rc_AI228696_at | NP_036238.1 | 1144 | 1197 |
| 1227 | rc_AI177055_at | NP_444278.1 | 1145 | 1198 |
| 1228 | rc_AI059519_at | NP_077300.1 | 1149 | 1199 |
| 1229 | rc_AA899491_at | A41706 | 1150 | 1200 |
| 1230 | rc_AI044635_at | NP_055749.1 | 1151 | 1201 |
| 1231 | rc_AI014091_at | Q99967 | 1153 | 1202 |
| 1232 | rc_AI012937_at | NP_038470.1 | 1155 | 1203 |
| 1233 | rc_AI008911_at | NP_036602.1 | 1156 | 1204 |
| 1234 | rc_AI007875_at | A36353 | 1157 | 1205 |
| 1235 | rc_AA997726_at | Q14690 | 1159 | 1206 |
| 1236 | rc_AA963171_at | NP_112487.1 | 1161 | 1207 |

*Muscle-specific

### EXAMPLES

Spinal Nerve Ligation and Artemin Treatment

[0112] Male Srague-Dawley rats were subjected to unilateral spinal nerve ligation (SNL) performed according to the procedure of Kim and Chung (1992) Pain, 50:355-365. Rats with motor deficiency were excluded. The L₅ and L₆ spinal nerves of anesthetized rats were exposed and tightly ligated with 4-0 silk sutures. Sham surgery was identical but without actual ligation.

[0113] Rat artemin (113 amino acids; SEQ ID NO:1237) was isolated and refolded from E. coli inclusion bodies and purified to >98% homogeneity (Gardell et al. (2003) Nature Med., 9(11):1383-1389). (The amino acid sequence of human artemin is set out in SEQ ID NO:1238). The purified artemin migrated as a reducible dimer by SDS-PAGE and eluted as a single peak (24 kDa) by size exclusion chromatography and by reverse phase HPLC. The purified product was confirmed to contain the characteristic cysteine knot disulfide pattern seen in GDNF, and to be fully active in vitro by assaying receptor binding, cell-based c-RET kinase activation (Sanicola et al. (1997) Proc. Natl. Acad. Sci. USA, 94:6238-6243) and sensory neuronal survival. Artemin (1 mg/kg) was injected subcutaneously on days 3, 5, 7, 10, 12 and 14 following spinal nerve ligation surgery.

Behavioral Assays

[0114] Hyperalgesia to thermal stimulation was assessed as described by Hargreaves et al. (1988) Pain, 32:77-88. Latency to withdrawal of a hindpaw in response to noxious radiant heat was determined. A maximal cut-off of 40 sec prevented tissue damage.

[0115] Tactile withdrawal thresholds were measured by probing the hindpaw with 8 calibrated von Frey filaments (Stoelting, Wood Dale, Ill.) (0.41 g to 15 g). Each filament was applied to the plantar surface of the hindpaw using the up-down method as described by Chaplan et al. (1994) J. Neurosci. Methods, 53, 55-63. Withdrawal threshold was determined by sequentially increasing and decreasing the stimulus strength and calculated with a Dixon non-parametric test (Dixon (1980) Ann. Rev. Pharmacol. Toxicol., 20:441-462).

[0116] Following behavioral confirmation of nerve ligation-induced tactile and thermal hyperalgesia, and efficacy of artemin on neuropathic pain behavior, skin samples were collected on day 14 post-spinal nerve ligation (following artemin injection and behavioral testing) from L4 dermatomes for subsequent gene expression profiling. The skin was shaved to remove as much hair as possible, and 12 skin samples in total were collected and snap-frozen, comprising triplicates from each of 4 groups of rats: (1) vehicle treated+SNL injury (ipsilateral to injury), (2) vehicle treated+SNL injury (contralateral to injury), (3) artemin treated+SNL injury (ipsilateral to injury), and (4) artemin treated+SNL injury (contralateral to injury).

Total RNA Purification

[0117] Snap frozen skin samples were homogenized using an Ultra-Turrax T8 (IKA-Werke, Staufen, Germany) in TRIzol™ reagent (Invitrogen Life Technologies, Carlsbad, Calif.) according to manufacturer's protocol. 100 μg of total RNA was further purified using an RNeasy™ Mini column (Qiagen, Valencia, Calif.) according to manufacturer's protocol.

Probe Labeling Hybridization and Scanning

[0118] The mRNA from skin biopsies samples was profiled on Affymetrix Rat Genome U34A, U34B, and U34C GeneChips™ probe arrays. These arrays contain more than 24,000 mRNA transcripts from gene and EST sequences found in Build 34 of the UniGene™ Database with additional full-length sequences from GenBank™ 110. GeneChip™ probe arrays are made by synthesizing oligonucleotide probes directly onto a glass surface. Each 25mer oligonucleotide probe is uniquely complementary to a gene, with approximately 16 pairs of oligonucleotide probes used to measure the transcript level of each of the genes represented in the array.

[0119] Sample labeling, hybridization, and staining were carried out according to the Eukaryotic Target Preparation protocol in the Affymetrix™ Technical Manual (701021 rev 1) for GeneChip™ Expression Analysis (Affymetrix, Santa Clara, Calif.). In summary, 5 μg of purified total RNA was used in a 20 μL first strand reaction with 200 U SuperScript™ 11 (Invitrogen Life Technologies, Carlsbad, Calif.) and 0.5 μg (dT)-T7 primer (SEQ ID NO:1239) in 1× first strand buffer (Invitrogen, Carlsbad, Calif.) with a 42° C. incubation for 1 hour. Second strand synthesis was carried out by the addition of 40 U of E. coli DNA Polymerase, 2 U of E. coli RNase H, 10 U of E. coli DNA ligase in 1× second strand buffer (Invitrogen) followed by incubation at 16° C. for 2 hrs. The second strand synthesis reaction was purified using the GeneChip™ Sample Cleanup Module according to the manufacturer's protocol (Affymetrix). The purified cDNA was amplified using BioArray™ high yield RNA transcription labeling kit (Enzo Life Sciences, Parmingdale, N.Y.) according to manufacturer's protocol to produce 70-120 μg of biotin labeled cRNA (compliment RNA). Rat Genome U34 A, B, and C GeneChip™ probe arrays were pre-hybridized in a GeneChip™ Hybridization Oven 640 (Affymetrix) according to the manufacturer's protocol. Fifteen μg of labeled cRNA was fragmented in 30 μL 1× fragmentation buffer 100 mM KOAc, 30 mM MgOAc at 95° C. for 35 minutes. The fragmented labeled cRNA was resuspended in 300 μL 1× hybridization buffer containing 100 mM MES, 1 M Na⁺, 20 mM EDTA, 0.01% Tween™ 20, 0.5 mg/mL acetylated BSA, 0.1 mg/mL herring sperm DNA, control oligo B2, and control transcripts bioB 1.5 pM, bioC 5 pM, bioD 25 pM, and cre 100 pM, and hybridized to GeneChip™ probe arrays according to manufacturer's protocol (Affymetrix, Santa Clara, Calif.). The hybridized GeneChip® probe arrays were washed and stained using streptavidin-phycoerythrinin (Molecular Probes, Eugene, Oreg.) and amplified with biotinylated anti-streptavidin (Vector Laboratories, Burlingame, Calif.) (Sigma, Saint Louis, Mo.) GeneChip™ Fluidics Station 400 (Affymetrix) using an antibody amplification protocol. The GeneChip™ probe arrays were scanned using GeneArray™ scanner (Hewlett Packard, Corvallis, Oreg.).

Data Analysis

[0120] Two independent analysis approaches (Rosetta Resolver™ and a proprietary permutation-based Bayesian statistical model) were used to identify bio- and surrogate markers.

[0121] The following analysis techniques were performed using Rosetta Resolver™ software (Rosetta Biosoftware, Kirkland, Wash.).

[0122] The triplicate samples were considered a single group for ANOVA analyses. The comparisons of interest include the following:
[0123] 1) Vehicle-treated vs. artemin-treated contralateral dermatomes;
[0124] 2) Vehicle-treated vs. artemin-treated ipsilateral dermatomes;
[0125] 3) Contralateral vs. ipsilateral vehicle-treated dermatomes;
[0126] 4) Contralateral vs. ipsilateral artemin-treated dermatomes.

[0127] A gene list was generated based on those genes whose expression level was found to be significantly different between groups (p≦0.01). These genes Were subsequently tested for significance (p≦0.01) in fold-change values. The final gene list for each of the 4 comparisons included those genes that passed both criteria. Agglomerative hierarchical clustering techniques (heuristic criteria=average link, similarity measure=Euclidean distance, intensity/Z-score used for clustering) ensured that these final gene lists differentiated well the two populations in each comparison from each other.

[0128] Permutation-based Bayesian Analysis was performed as follows. For all genes, a permutation based approach was used to generate distributions of log ratios of the expression intensity values for all possible pairwise within group (between replicates) and between group comparisons of the samples.

[0129] For example, the 3 replicate rats generated 3 within-group pairwise comparisons for each of the 4 treatment scenarios outlined above. In this way, a total of 12 within-group log ratios and 9 between-group log ratios for the 6 possible between-group comparisons were generated (Table 14). This was done for the A, B, and C chips.

TABLE 14

| Comparison | | | No. of pairwise |
|---|---|---|---|
| type | Group 1 | Group 2 | comparisons |
| Between | Vehicle-treated, | Vehicle-treated, | 9 |
| group | ipsilateral | contralateral | |
| | (3 replicate rats) | (3 replicate rats) | |
| Between | artemin-treated, | artemin-treated, | 9 |
| group | ipsilateral | contralateral | |
| | (3 replicate rats) | (3 replicate rats) | |
| Between | artemin-treated, | Vehicle-treated, | 9 |
| group | ipsilateral | ipsilateral | |
| | (3 replicate rats) | (3 replicate rats) | |
| Between | artemin-treated, | Vehicle-treated, | 9 |
| group | ipsilateral | contralateral | |
| | (3 replicate rats) | (3 replicate rats) | |
| Between | Vehicle-treated, | artemin-treated, | 9 |
| group | ipsilateral | contralateral | |
| | (3 replicate rats) | (3 replicate rats) | |
| Between | artemin-treated, | Vehicle-treated, | 9 |
| group | contralateral | contralateral | |
| | (3 replicate rats) | (3 replicate rats) | |
| Within group | Vehicle-treated, | Vehicle-treated, | 3 |
| | ipsilateral | ipsilateral | |
| | (3 replicate rats) | (3 replicate rats) | |
| Within group | Vehicle-treated, | Vehicle-treated, | 3 |
| | contralateral | contralateral | |
| | (3 replicate rats) | (3 replicate rats) | |
| Within group | artemin-treated, | artemin-treated, | 3 |
| | ipsilateral | contralateral | |
| | (3 replicate rats) | (3 replicate rats) | |
| Within group | artemin-treated, | artemin-treated, | 3 |
| | contralateral | contralateral | |
| | (3 replicate rats) | (3 replicate rats) | |

[0130] All ratio calculations were performed using the Affymetrix™ MAS5 application that summarizes the ratios of background corrected intensities (perfect match minus the mismatch intensity values) using an Affymetrix™ proprietary error model described in Affymetrix Microarray Suite User's guide Version 5.0 (2001). Default parameters were used to quantify signal intensities (Alpha1=0.04; Alpha2=0.06; Tau=0.015; Noise (RawQ)=2.800; Scale Factor (SF)=1.000 Norm Factor (NF)=1.000; Gamma1L=0.0025; Gamma1H=0.0025; Gamma2L=0.003; Gamma2H=0.003; Perturbation=1.1). The summarized signal log ratios with their associated P values were exported for statistical analysis.

[0131] The prior distribution of the log ratios were used to update the P values (posterior probability) of the between group comparison log ratios. Genes with between group log ratio distributions that significantly (p<0.05) differed from the within group distribution of log ratios were selected as differentially expressed genes. The summary log ratio for any comparison was estimated as an error-weighted mean of all the permuted log ratios in that group.

[0132] 308 genes that are affected by spinal nerve ligation injury (vehicle-treated ipsilateral vs. contralateral dermatomes) and that therefore correlate with neuropathic pain behavior are listed in Table 2.

[0133] To identify surrogate markers of artemin neurotrophic activity, genes with specific profiles of interest (e.g., genes that were up-regulated after injury and then down-regulated to normal levels with administration of artemin) were found by intersecting the lists of genes comparing contralateral vs. ipsilateral vehicle-treated dermatomes and vehicle-treated vs. artemin-treated ipsilateral dermatomes. 107 surrogate markers of artemin neurotrophic activity thus identified are listed in Table 6.

[0134] To identify biomarkers of artemin's in vivo biological activity, genes in common on the lists comparing vehicle-treated vs. artemin-treated contralateral dermatomes and vehicle-treated vs. artemin-treated ipsilateral dermatomes were identified. Genes were then identified that are regulated in the same direction by artemin in the contralateral and ipsilateral dermatomes. 49 biomarkers of artemin biological activity were thus identified and are listed in Table 10. FIG. 7 shows an example of a BMN that has not been confirmed by TaqMan™ analysis.

[0135] To confirm the validity of surrogate markers and biomarkers, 25 preferred surrogate markers of neurotrophic activity and 5 preferred biomarkers were used for sequence analysis to validate the existence of transcripts. The sequence analysis included a BLAST™ search of the Affymetrix™ target sequence against the rat genomic sequence. The genomic locus was then examined for the existence of exons, ESTs, and predicted transcripts. The genes are prioritized based on transcript evidence and subjected to TaqMan™ validation as described below (see, also, Holland et al. (1991). Proc. Natl. Acad. Sci. USA, 88:7276-7280).

TaqMan™ Analysis

[0136] Trizol™ (Invitrogen) purified rat skin RNA was further re-purified using an RNeasy™ Mini kit (Qiagen) according to the manufacturer's protocol. The RNA was digested with Amplification Grade Deoxyribonuclease 1 (Invitrogen) to remove any contaminating DNA, and was subsequently used as a template for cDNA synthesis with a High-Capacity cDNA Archive Kit (Applied Biosystems). The resulting cDNA was used as the PCR template for TaqMan™ analysis.

[0137] The “TaqMan MGB Probe and Primer Design” function of Primer Express 1.5 software (Applied Biosystems) was used to generate primer and probe sequences for Affymetrix target sequences (for example, see Table 15 for rc_AA818804_at RG-U34C, rc_aa818120_at RG-U34C, and X14812_at RG-U34A).

TABLE 15

| | | | Forward | Reverse | |
|---|---|---|---|---|---|
| | Marker | Amplicon | primer | primer | Probe |
| | SEQ | SEQ | SEQ | SEQ | SEQ |
| AffyID ™ | ID NO: | ID NO: | ID NO: | ID NO: | ID NO: |
| rc_AA818120_at | 31,808 | 1240 | 1241 | 1242 | 1243 |
| RG-U34C | | | | | |
| rc_AA818804_at | 18,799 | 1244 | 1245 | 1246 | 1247 |
| RG-U34C | | | | | |
| X14812_at | 13 813 | 1248 | 1249 | 1250 | 1251 |
| RG-U34A | | | | | |

[0138] Oligomers spanning the PCR amplicon, plus an additional 10 bp on the 5′ and 3′ ends of each gene were also synthesized. Primers and 6FAM-labeled probes were synthesized by Applied Biosystems, and set up in reactions with the cDNA templates according to standard methods. Reactions were carried out in an ABI Prism™ 7700 Sequence Detector using the default conditions, and the data was analyzed using Sequence Detection Software v1.9.1 (Applied Biosystems). Simultaneous PCR reactions were carried out using a 10-fold dilutions series of the amplicon oligomers to generate a standard curve for each primer and probe set. Cycle Threshold (Ct) values for each experimental reaction were compared to the amplicon standard curve and relative quantities of message were determined. The cDNA samples were also analyzed with TaqMan™ Rodent GAPDH Control Reagents (Applied Biosystems) to determine the amount of GAPDH message in each sample. The samples were normalized by dividing the signal for each of the surrogate marker genes by the signal obtained with the GAPDH control. The results are shown in FIGS. 1-6.

[0139] The expression patterns of the genes shown in FIGS. 1-6 parallel the results of the Affymetrix analysis. All of these genes are expressed at a low level in the uninjured state (vehicle/contralateral and artemin/contralateral), are up-regulated in the injured state (vehicle/ipsilateral), and are at least partially normalized following artemin treatment (artemin/ipsilateral). The expression profiles are consistent with these genes acting as surrogate markers of artermin activity in the rat spinal nerve ligation model.

[0140] All references to nucleotide sequences should be understood to encompasses their sequences complementary to a given sequence. All publications and patents and sequences cited in this disclosure by their accession numbers are incorporated by reference in their entirety. To the extent the material incorporated by reference contradicts or is inconsistent with the present specification, the specification will supercede any such material.

[0141] The material submitted herewith on the CD-ROM entitled “Surrogate Markers of Neuropathic Pain,” containing file surrmarkers012504.5T25.txt, size on disk 4,515,840 bytes, created on Feb. 20, 2004, is hereby incorporated by reference.

[0142] The specific embodiments described herein are offered by way of example only and are not meant to be limiting in any way. It is intended that the specification and examples be considered as illustrative only, with a true scope and spirit of the invention being indicated by the following claims.

The application's sequence listing, which the Patent Office published only in electronic form, follows.

SEQUENCE LISTING (1251 sequences)

SEQ ID NO: 1 - DNA, 2316 bp, rat
atggattcccagcgggagcttgcagaggaactccggctttaccaatccacccttcttcaggatggtctaaaagatctcctggaagagaaaaaattcatcgattgtaccctaaaagcaggtgacaaaagttttccttgccacagactgatattgtcggcttgtagcccttacttccgtgagtatttcttatctgaaattgaggaggagaagaaaaaggagatggcgctagacaatgtagatcctgctatacttgatttgatcatcaaatacctgtactctgccagtattgatctcaatgacgggaacgtgcaagacatcttcgccctgtccagccgcttccagattccgtcggtgttcaccgtctgtgtgtcttaccttcagaaaagactggctcctggtaactgtctggccatcctaagattggggcttcttctcgactgtccaagacttgccatttctgcccgggagtttgtgtcagatcgctttgtgcagatttgtaaggaagaagacttcatgcaactgtccccacaggagctgatctctgtcatttcaaatgacagcctcaatgtagaaaaggaggaagtggtatttgaggccgtgatgaaatgggtacggacagacaaagaaaacagggcgaaaaatcttagtgaagtatttgactgtattcgttttcgccttatggctgagaaatatttcaaagatcatgtcgagaaggatgacataattaaaagcaacccagaagtccagaaaaaaatcaaagttctaaaggacgcttttgcaggcaaacttccggaacccagcaaaagcgcagagaaaggggggacgggcgaggtgaacggtgatgttggtgatgaagacttacttcctggttacctgaatgatatccccaggcatggaatgttcgtcaaagatctcatcctcttggtcaatgacacagctgcagtggcgtatgaccccatggaaaatgagtgttatcttactgccctagctgagcagatccccagaaatcattccagtattgttacccaacagaaccaggtctacgtggtcggaggactgtacgtggacgaagagaataaagatcaacccctgcaatcctactttttccagcttgataacgtatcatctgagtgggttggactaccgcctctcccgtcagccaggtgcctctttggtctgggagaggtagatgacaaaatctatgtggtcgccggcaaagaccttcagacagaggcctccctggattccgtgttatgctatgatcctgtggctgcaaagtggagcgaagtgaaaaatcttcctattaaagtttatgggcataatgtgatctcacataatgggatgatatactgtctgggcggaaagacagatgacaaaaagtgtacgaatagggtgtttatctacaaccccaagaaaggagactggaaggatctggctccaatgaaaaccccacgttccatgtttggagtggcaatccacaaaggcaaaatcgtgatcgcaggaggcgtcactgaagatggcctttcagcttcagttgaagccttcgacctcaaaaccaataagtgggaagtgatgacggaatttccccaagaaagaagctccatcagcctggtgagcctggccggatccctgtacgccatcggcggctttgcgatgattcagttggaatctaaagagttcgcgcccactgaagtcaatgacatatggaagtatgaagatgataaaaaagaatgggctgggatgctgaaggagattcgatatgcttcgggagctagttgcctagcaacacgcttaaatctgtttaaactgtctaaactataaaggaggtgacaaagacacggtttgagaggtggcttgttgggacaagagggccttaatgtattgtccttctttaagcctatacaatgattcatgtagggtaacattgatctgtgcagttccccgggagataaaacagtgtaaccgaatccccaaggtgttttagcgtgtggagtataaaaccgtttgctagggagttagtatacagttgaacaatgtattttgtcaaacctttctcatagaagcgagctttctacatcctgatgtttactaatcctttgtattcttaaggtacatttacacttgttttctattataaatgaaatgcatatgtctacactctcaagagatgtttgagtaacagaaacctctccccggttttgagctacgacaggaatcttgtgcattttaatgaagatgactggaagtgctgtataagaagtgtaataaaggagtgtccagtcccttccccattaaaaaaaaaaaaaaaaaaaactc

SEQ ID NO: 2 - DNA, 465 bp, rat
atggggctcagtgatggggagtggcagatggtgctaaacatctgggggaaagtggagggcgaccttgctggccatggacaggaagtcctcatcagtctatttaaggctcaccccgagaccctggaaaagttcgacaagttcaagaacctgaaatccgaggaagagatgaagagttcagaggacctgaagaagcacggctgcaccgtgctcacagccctgggtaccatcctgaagaagaagggacaacatgctgctgagatccagcctctggcccagtcccacgccaccaagcacaagatcccggtcaagtacctggagtttatctcagaagtcatcatccaagtcctgaagaagagatattccggggactttggagcagatgctcagggcgccatgagcaaggccctggagctgttccggaatgacattgctgccaagtacaaggagctgggcttccagggctga

SEQ ID NO: 3 - DNA, 5925 bp, rat
ccgctcagtcatggcggatcgagagatggctgcatttggggccggagcccccttcctgcgaaaatctgagaaggagcggctggaggcgcagaccaggccctttgacctcaagaaagatgtttttgtgcctgatgacaaagaagagtttgtcaaggccaagatcgtgtctcgagagggtggcaaagtcaccgctgagacagagaatggcaagacggtgactgtgaaggaggaccaggtgatgcagcagaaccctcccaagttcgacaagatcgaggacatggccatgctgaccttcctgcacgagccggctgtgctctacaatctcaaggagaggtacgcttcctggatgatctacacctactcaggcctcttctgtgtcaccgtcaacccctataagtggctgccagtgtacaatgcgcaagtggtagctgcctaccggggcaagaagaggagcgaggctccaccccacatcttctccatctctgacaacgcctatcagtacatgctgacagatcgggagaaccagtccatcctcatcaccggagaatccggagctggtaagaccgtcaacaccaagagggtcatccaatattttgctgttattgctgccattggggaccgcagcaagaaggaccagaccccaggcaagggcaccttggaagatcaaatcatccaagccaaccccgctctggaggcctttggcaatgccaagacagttcggaatgataactcctcccgatttgggaaattcattcgaatccattttggggcaacaggaaagttggcatctgcagatatagagacctaccttctggaaaaatccagagttattttccagctgaaagcagaaagagattatcacattttctaccaaatcctgtctaataaaaagcctgagcttctagacatgctgctgatcaccaacaacccctacgattatgcgttcttctcccagggagagacgactgtggcctcaatagatgactctgaagagcacatggccaccgatagcgcctttgatgtgctgggcttcactccagaagagaagaactccatttacaagctgacaggcgccatcatgcactttggaaacatgaagttcaaacagaagcagagggaggagcaggcagagccagacggcacggaagaagctgacaagtcagcctacctcatgggactgaactcggctgacctgctcaaggggttgtgccaccctcgagtcaaagtgggcaacgagtatgtcaccaaagggcagaatgtccagcaggtggcatatgccatcggggcactggccaagtcagtgtacgagaagatgttcaactggatggtgacacgcatcaacgcaaccctggagaccaagcagccacgccagtacttcataggtgtcctggacatcgccggctttgagatctttgatttcaacagctttgagcagctgtgcatcaacttcaccaatgagaagctgcagcagttcttcaaccaccacatgttcgtgctggagcaggaggagtacaagaaggaaggcatcgagtggacgtttattgacttcggcatggacctgcaggcctgcatcgacctcatcgagaagcccatgggcatcatgtccatcctggaggaggagtgcatgttccccaaggccacggacatgaccttcaaggccaagctgtacgacaaccacctgggcaagtccaacaacttccagaagcctcgcaatatcaagggaaagcaggaagcccacttctctctgatccactatgctggcaccgtggactacaatatcctgggctggctacagaagaacaaggaccctctcaatgagacggtggtggggctgtaccagaagtcctccctcaagctcctaagtaatctgtttgccaactatgctggagctgatgcacctgtagacaagggcaaaggcaaagcaaagaaaggctcatcctttcagaccgtgtccgcactgcacagggaaaatctgaacaaacttatgacaaacctgcgctccacgcaccctcactttgtacgctgcatcatccccaatgagacgaagtctccaggggtgatggacaaccccctggtcatgcaccagctgcgatgcaacggagtgctggagggtatccgcatctgtaggaagggcttccccaaccgcattctttatggggacttccggcagaggtatcgaatcctgaacccagcagccatccctgagggccaattcattgatagccggaaaggggctgagaagctgctgggctccctggacattgaccacaaccagtacaagtttggccacaccaaggtgttcttcaaggcggggctgctggggctgctggaggagatgcgagatgagaggctgagccgcatcatcaccagaatccaggcccagtcccgaggtgtactttccagaatggagtttaagaagctgctggagcgcagagactccctgctgattatccagtggaacatccgcgccttcatgggggtcaagaattggccgtggatgaagctctacttcaagatcaagccgctgctgaagagcgcagagacagagaaggagatggccaacatgaaggaggagttcgggcgagtcaaagatgcactagagaagtctgaggctcgccgcaaggagctggaggagaagatggtgtccctgctgcaggagaagaatgacctgcagctccaagtgcaggcggaacaagacaacctggcagatgccgaggagcgctgcgaccagctgatcaagaacaagatccagctggaggccaaggtgaaggagatgaccgagaggctggaggacgaggaggagatgaacgccgagctcacggccaagaagcgcaaactggaagacgagtgctcagagctcaagagagatatcgatgacctggagctgaccctggccaaggtggagaaggaaaagcacgcaacagagaacaaggtgaaaaacctgacagaggagatggctgggctggacgagatcattgtcaagctgaccaaggagaagaaagctctacaagaggcccaccagcaagccctagatgaccttcaggctgaggaggacaaggtcaacactctgaccaaggccaaggtcaagctggagcagcaagtggatgatctggagggatccctggatcaggacaagaaggtgcgcatggacctggagcgagcaaagcggaagctggagggtgacctgaagctgacccaggagagcatcatggacctggagaacgacaagcagcagttggatgagcgactcaaaaagaaggactttgagttaaatgcactcaacgccaggattgaggatgagcaggccctgggcagccagctgcagaagaagctcaaagagcttcaggcacgcatcgaggagctggaggaggagctggaggctgagcgcacagcccgggccaaggtggagaagctgcgctcagacctgtcccgggagctggaggagatcagtgagaggctagaggaagccggtggggccacatctgtgcagatagagatgaacaagaagcgcgaggccgagttccagaagatgcggcgggacctagaggaggccacgctgcagcatgaggccacagctgcggccctgcgcaagaaacacgcggacagcgtggccgagctgggcgagcagatagacaatctacagcgggtgaagcagaagctggagaaagagaagagcgagttcaagctggagctggatgacgttacctccaacatggagcagatcatcaaggccaaggctaacctggagaagatgtgccggaccctggaggaccagatgaatgaacaccggagcaaggctgaggagacacagcgttctgtcaatgacctcacccgccagcgggccaagctgcagacagagaatggggagctgtccagacagctggatgagaaggaggctcttatctctcagctgacccgaggcaagctcacgtatacccagcagctggaggacctcaagaggcagctggaggaggaggtcaaggccaagaatgccctggcccacgcactgcagtcagcccggcatgattgcgacctgctgcgggaacagtacgaggaggaaacagaagccaaggctgagctgcagcgtgtcctgtccaaggccaactcagaggtggcccagtggaggaccaagtatgagacggacgccatacagaggacggaggagctggaggaagccaagaagaagctggctcagaggcttcaggatgctgaggaggcagtggaggccgtcaacgccaagtgctcctcgctggagaagaccaagcacaggctgcagaacgagatcgaggacctgatggtggatgtggagcgctccaatgcggccgccgcagccctggacaagaagcagaggaacttcgacaagatcctggttgagtggaagcagaagtatgaggagtcccagtcagagctggagtcttcccagaaggaggcgcgctccctgagcacagagctcttcaagctgaagaatgcctatgaggagtctctggagcacctggagaccttcaagcgggagaacaagaacctccaggaggagatctcagacctgactgaacagctgggctcaactgggaagagcatccacgagctggagaagatccgaaagcaactggaggctgagaagctggagctgcagtcagccctggaagaggctgaggcctccctggagcatgaggagggcaagatcctccgagcccagctggagttcaaccagatcaaggcagagatcgaaaggaagctggcagagaaggacgaggagatggagcaggccaagcgcaaccacctgcgggtggtggactccctgcagacctccctggatgccgagacgcgcagccgcaacgaggccctgcgggtgaagaagaagatggagggcgacctcaacgagatggagatccagctcagtcatgccaaccgcatggctgctgaggcccagaaacaagtgaagagcctccagagtttgctgaaggacactcaaatccagctggatgacgcagtccgtgccaatgacgacctgaaggagaacatcgccatcgtggagcggcgcaacaacctgctgcaggcggagctggaggagctgcgggccgtggtggagcagacggagcggtctcggaagctggcagagcaggagctgatcgagaccagcgagcgggtgcagctgctgcactcccagaacaccagcctcatcaaccagaagaagaagatggatgcagacctctcccagctccagacagaggtggaggaggcggtgcaggagtgtaggaacgcagaggagaaggccaagaaggccatcacagatgccgccatgatggccgaggagctgaagaaggagcaggacaccagcgcccacctggagcgcatgaagaataacatggagcagaccatcaaggacctgcagcaccggctggacgaggcagagcagatcgccctcaagggtggcaagaagcagctgcagaagctggaggcccgggtccgggagctggagaatgagctggaggctgagcagaagcgcaatgcggagtcggtgaagggcatgaggaagagcgagcggcgcatcaaggagctcacctaccagacagaggaagacaggaagaacctactgcgactgcaggacctggtggacaagctgcagttaaaggtgaaggcctacaagcgccaggctgaggaggcggaggaacaggccaacaccaacctgtccaagttccgcaaggtgcagcacgagctggatgaggcagaggagagggcggacattgccgagtcccaggtcaacaagctgcgggccaagagccgtgacattggcgccaagggcctgaatgaagagtagatcttgtgctacccaaccctaaggatgcctgtgaagccctgagacctggagcctttgaaacagcaccttaggcagaaacacaataaagcaattttccttcaagccaa

SEQ ID NO: 4 - DNA, 656 bp, rat
  misc_feature (494)..(494): n is a, c, g, or t
  misc_feature (524)..(524): n is a, c, g, or t
  misc_feature (580)..(580): n is a, c, g, or t
  misc_feature (636)..(636): n is a, c, g, or t
  misc_feature (640)..(641): n is a, c, g, or t
catggctgagcgtttattgcagtgctaacagagggtgctgggggcctgccctgctttcaccctctttacatccccctccttccggtctccaagcatccttccggagcattctacatccttccttctcctactccatcgctgtaaccgcacaggcgtgttccagggcctctcacggggcctctggctctcaacagaatctcttgtcccttcttctggggctgagggtactcagctctccactcctagtgtccaccatccttgttcccctccctgtggggacccaggacacctaggcatcctggcctctggctccctcctcccatggcccgcacctctgggcaaactacaaagcagccttggccagcagctctcccccatcgtcctaggcaggaagtgcccagcccaaggcagacacatcagagtctgcatcggtcgcagtcatctcagcctctctgagcttcctgagacatggaccgagacagggtacgccgcangggcccaagtttgctgactggcacaccggnggaagctgcttggtgatctcagccacgtcctggcgctccacgcactggccgcccanggctgtcttcagggcagcagctccgcagctgaatggggtctctcgcgtcctcctgntggnncccactggtaggggg

SEQ ID NO: 5 - DNA, 1285 bp, rat
acattccctctttagccagtgcctaggctgtcagcagagaagaaacaggtagcatggctcctggagaaactgtaagggaggcggggccggccaagagtgccctccagaaggtccgcagagcaaccctggtgatcaacttggcccgaggatggcagcagtgggcgaatgagaacagtaccagacaggcccaggagcctgcaggctggctgccaggagcaactcaagacctacctcacactcctaaagaaccgggtcctcgccagcatgcccccaaacctccgtctccaaagccagatggagacagagagggacgaggctctgaggaagccacggaggtctcccatatcaaaaggaaagaggtgaccagaacggttgtcagtaaggcgtatgagagaggaggagatgtgaactacctgagccacaggtacgagcatgatggcggcgtgtctgaagcggtccagccagacaatgacattgacagaatcctcctcagtcacgactcgccaacgcggagaagaaaatgcaccaacttggtatctaagctgaccaaaggctggaaagtgatggaacaggaggagcccaagtggaagagtgacagcatagacacagaggacagtggctacggaggggacatggaggagaggcctgagcaagatgtagcgcaggtggctgctgccaggattaaacgccccttgcactcccaggcaaacagatactcagagacactcaactgtaaggcccatcggaaatacagccaagtggacaacttgaaaggcaggtggcagcagtgggccgatgaacacatacagtcacagaagctcaaccccttcagtgatgaatttgactatgacctagccatgtccactcgactccacaagggagacgagggatatggccgcccaaaagagggaagcaagacagctgaaagggccaagagagccgaggagcacatctatcgggaaattatggaattgtgctttgttatccgcacaatggctcgccatagacgagatggcaagatccaggttactttcggagaactctttgatagatatgttcgaatttcagataaagtggtgggcatcctcatgcgtgccaggaaacacggactggtgcactttgaaggggagatgctatggcaaggcaaagatgaccatgttgtgattactctccttgagtaagccctcaataaatcaacctgccattgttttactattaaatgataatgtattataagttcaaaggcaaactgctctggaatgttatcaatattaaatgatttatt

SEQ ID NO: 6 - DNA, 844 bp, rat
gggggagactgagtataagaactgtgagctggacaagaaccagcgccaatgtgtgcagtatgccctgaaggcccgcccgctgaggtgttacatccccaaaaacccataccagtatcaggtgtggtatgtcgtcacttcctcctactttgaatacctgatgtttgctctcatcatgctcaacactatctgcctaggcatgcagcattacaaccagtcggaacagatgaaccacatctcggacatcctcaatgtggctttcaccatcatcttcaccctggagatgatcctcaagctcatagctttcaagcccaggggctattttggagacccctggaacgtgtttgactttctaatcgtcattggcagcatcattgacgttatcctgagtgagatcgatgacccagatgagagcgcccgcatctccagtgccttcttccgcctgttccgagtcatgcgactgatcaagctgctgagccgggcggagggtgtgcgcaccctgctctggacgttcaccaagtccttccaggccctgccgtatgtggctttgctgatcgtcatgctcttcttcatctacgctgtcatcggcatgcagatgttcgggaagatcgccatggtggacgggacgcaaataaaccggaacaacaacttccagactttcccacaagctgtgctgctgctcttcaggtgtgccacaggggcagcctggcaggagatcctgctggcctgcagctacgggaaacgctgcgacccggagtctgactacgcaccgggggaggagtacgcgtgtggcaccaactttgcctactactacttcatcagcttctacatgctctgcgccttcctg

SEQ ID NO: 7 - DNA, 1448 bp, rat
  misc_feature (1345)..(1345): n is a, c, g, or t
  misc_feature (1376)..(1376): n is a, c, g, or t
  misc_feature (1413)..(1414): n is a, c, g, or t
cggccagtggaaggaacaagtcttttccgacctgatggagctgtatgaaacatccccctatttctaccaggagccccacttctatgacggggaaaactaccttcctgtccaccttcagggcttcgagcccccgggctatgagcggaccgagctcagcttaagcccggaagcccgagggcccctagaagagaagggactggggacccctgagcattgtccaggccagtgcctgccctgggcgtgtaaggtgtgtaagaggaagtctgtgtctgtggaccggcggagggcagccacactgagggagaagcgcaggctcaagaaagtgaatgaggccttcgaggctctgaagagaagcaccctgctcaaccccaaccagcggctgcctaaggtggagatcctgcgcagtgccatccagtacattgagcgcctacaggccttgctcagctccctcaaccaggaggagcgcgatctccgctaccgaggcgggggcgggccccagccggtggtacccagtgaatgcaactcccacagcgcctcctgcagtccggagtggggcaatgcactggagtttggtcccaacccaggagatcatttgctcgcagctgaccctacaggtgcccacaacctgcactcccttacgtccatcgtggacagcatcacggtggaggatatgtctgtcaccttcccagatgaaaccatgcccaactgagattgtctgccaggctgggtgtgcatgggagcccctgagttggtgtcagacgccaccacttctgcagcaggggccttttaagtggggctgtcctggtgcccagaaaacagccctgggctgccacaagccagactacccaccgtccattcacataagactaacacccagcccagcaagggaatttaactgactccttaaagcagagagtatccccttccaaggagagaaagatggagtccagagagcccccttgttaatgcccctcaacggggcaaactcaggagcttccttttttttttcttcataatgcgcctctaattccaccccccaaatgagacagtttgagagacagtgagtgccccgaccgggacaagtgtgcacatctgttcgactctcttcctgatgccagtggctgggctgggcctgccctgagatgagagagaagggagggaacgatagggttccaaagtctctggggggcaagcatttgcagtggatattgggaaccttccagtgctttgtgtattgtttattgttgtgtgtgttgtttgtaaagctgtcatctgaccaaggtctcctgtgctgatgccagggacaggcagggaagggggtgggggctcttggggtgacttcttntgttaactaagcattgtgtggttttgccaantttttttgtaatttttttgctaacttatttggatttnnttttttaaaaaatgaataaagaccggttgctatc

SEQ ID NO: 8 - DNA, 10729 bp, rat
cgctgagaacttgatgaccataaccaggacatttactacagaagccctcctggtgttgaggcctccttttcagaagcgcatgacactgtgctgtaagtggagtgaaaaataaacgcagggtcacatggagttaaagaaaaaggcacacttgatgagccagcacatagcatggtgagtgttgaaattggattttcggctagtacagctactttttctaaaatcccaagataaagcctagaggcttcacctgttgttcactgctgtccgaaagctataaataggtctgaagctcatctccccttttagcagggcagggtcaggttacagggggcaaaacaaaataatcaaatgagtgtctggtatgtcacagagtcagtctgccatccccacagtctctctccttcctctgctgtgctgtcctagaatccaggatcccagtcacaatgcctctgttcaaacttacaggtaggtgtgcagaaaggattggagaactcagggattttttttccatatgcagccattcctttaactaccatgtcagcttcagcaaccctttatttaggcttcagaatagcttcagatgtacatgtcagagaaggaacaccccagcaccacagccctgcaagaagaactttttaaagagtattactatgtgcttaagacatgtgctaggaaggacaggaatgaaagcatatagggaccttataagatgagctagtaccacccctgtctgtggcggtctaccctgcttcccagagaccgggtgcgtggtcacagcagatggccagagttgctcatatgtctgtctcatttgtttcacaggtcaaggaaaacgtgagtatttgggactattttcctgccaattgcaagtgcctgtaaacaaagtgacagtgttccttaatttacaaaggggcttatttctcagcagcgtttataaatggaaccacgcaaagctagtaatgatcactgatacccgtagatagatgattctcgactctagcacaaaaaatattttgtagtgaatttttagggggccagataaaacacgattttagataaaattagctttagttgtgtttctgcctgctctccaattctaactttctttgtacatggcaagcttctgcgaagtcttgctacagtagctgactcttcgctgttctcatttctgctacagtagctgactcttcgctgttctcatttctgctcacccgctcttttctgggagtaccaaaaggctcctagaagtgcaggagtgggttgggagatggctgtgagctgggcatgtagagaagacagtggaactcaacagaaaaacagatatgtttttgaccgtcactgccccgtaggaggaaactgggtcttactttctgaaggtttggagattatgcattgtcaagccagcggagctcacccttgtttcttcattttaagaatggaaaaactttgacttggtggtggtggtggtggtggtgactgtggcagcgcacgcctttagacccagcacttgggaggcagaggcaggtggatctgagttccaagccagcctggtctacagaatgaattccagggcagacagggatacacagagaaaccctgtcttgaaaaaaagaaaggaaagcaaaacaaagcaaacaaacaaaaagaatgggaaacatgggctgagtccagtccctggatcccactcacgtggtgggaggagagagctgacaccaaaggtgtgctctgtctctgtctgcctacctgtctgtctctttctctccatctctctctctgtctgagagagagatagagggagggagggagggggggagggagagagagagagagagagagagagagagagagaatgggaaaatgtagggtgtcaactaatgtgtgaaaaactcttctagaaattgatgatgcaatgcgtagctttgctgaaaaagtatttgcctcagaagtcaaagatgagggaggtcggcacgagatctcccccttcgacgtggatgagatctgcccaatttccctccgtgagatgcaggcccacatattccacatggagaacctgtccatgtccatggatggcaggaggtaagtgtggcaccttgggaccgactgtggtggctcctgaaggaaggtctctgtctcagtgcgggtaacacggaaaggaagaactctgccagggttccaagttcttcttcctcttctttgcataggttagggtgagatactagtgacagaaaaaaagaaaacagtcccctcctgcccttgtctacatcgtaagctaaataaagattttctatcaccccaggaagagaactggagcctccaaagtgggcggacagctgcagtaaccttctaatatattccctcgaggtccccagtactaaaagaaccgatcggaatttgctggattctttcttttcccactatcatagtatcttgcttctgacaacaagtccatattttatttatttatttattttactgtttttggcctcaaaataaaccaggatagtgaaaaatccatttattatgatgggactcctgaggaggatcaagctaatttttctttttttctttgtttacttcaaacccaggaaaaggcgcttccaaggacggaagactgttaatttgtccattccgcaaagtgaaacgtcttctaccaaactgtcccacattgaagaatttatttcttcatccccgacctatgagagtgtgcctgacttccagagggtgcagatcactggtgactatgcctctggggtgagtcatacttgccgtgccaatgtccccagacgaacactcgtagctccacgccgtcttccctccctgtgcagatgctgcttgcctctcttgccatgcttcctctgcaactcagtcctactgctgaacgtcagtgacgtttctgtgctgctccatcatcccacacagcgccccctttatccggtttactaatacagtgacaatgtgaagaaggatccctgtagataacccagactacagtggacagactgggcaaaaggaccaaagggagcagcaaggaagaacactttgttctagctgactgtaccctaaagtaaaaacagagctgaggggctgaccggggagggcactgcaggtgaactgagtttgccaaggaggctagagacctgagtccagccccagctgccacatggcagaaggagagagacaacttgtgcaattgtcctctgatctccatatgcacagcatggcaattccacaaacaaacaacaaacaaacaaacaggggaatcttttttaatgtttatttattgtatatgtatacactatagctgtcttcagacacaccagaagaaggcatcagatcccattacagatggctgtgagccaccatgtgattgctgggaattgaactcaggacctctggaagagcagtcagtgctcttaaccactgagccatatttccacagcacacaggaaagccagaactatgagaaatcagctgaccactttccagagtctcacaggcttagctctgatactttcttggcaggtaactgttgaagactttgaggtggtttgtaaaggtctctatcgggctttgtgtatacgagagaaatacatgcagaagtcattccagaggttccccaagaccccctccaagtacctgaggaacatcgacggcgaagctttggtagcaatcgaaagcttctatccaggtaacttactctctcatgaatgtaaggagtatagctttaggtttatctactaagtatgattttgttttgtttttgtttctttcttgagacaagcttgctctgcataaccctggctgtcctggagcttgctttgtagaccaggctggcctcaactcaaagattcatctgcctctgcctcccaagtgagtgctggaactaaagtggtggccaccaatgcccagcattaaagacaaactttagtgtttttagactatcagtgacccagtcttaaagtcacttgatttggcccttataatacctctcttcaggatctctgtttaaagacagggtttcactgtggagctctgactgtcctggaactcgctctgtagaccaggctggtgatggtacatgattttagtccctcccttcgtgaggcatgaggattttaagagtatgtgttttaggccagcctggcatacatagcaagttccagggcagccagggctacatagtgagaccctgccttttaaaaaaaaagacaagttaactaatgttggataattataaccaatgaagtctgagatgacaaactaatgatgcgatttgctgtatttcttatttggttatttttacatggtcattcgtcctatgtgctgatctataactctgtgttttattgaaaaagtatttacccctcctccgaagaagggagaagacccctttcgcagagaagaccttcccgcaaacctgggctatcacctcaagatgaagggtggtgtgatttacatctaccctgatgaagcagcagccagcagagatgagcccaagccctacccttacccaaatctggatgacttcctggatgacatgaattttttgcttgctctaattgcacaagggcctgtgtaagtgttcactgagatctaaacactagcaaccagtgtacgatgatcagaggaatgcttattatgctcaccttgtccaaatactgcattcaactcctttctttattccttgcaagagccttatgcatgcatgcatctatctgtctgtctgtccgtccgtccatccatctgtccatctatctatctatctgtctgtctgtctatctatcaatcaatcaatcatctatttatttatttgaggtgtctcaagtggcccaggctaacatcaaacttactctgagtcctgactgaccttgaacttctatcctcgtgcctctatttttaaatgcattcctagtcctccttcattattatacccagctttgactgaaagctgggtgctttgcagtgggatcaactatggaagaaacctgttcctgcaacgatttcctcttatgggtgagaagagtcctggaggcttctttgaaattgttaaccattttccctacatgtccagaaagatgtttagacatctatcctgtgtgtttacttttcacaggaagacttacactcaccgccgtctgaagttcctctcctccaagttccaggtccatcagatgctgaatgagatggacgagctaaaggagctgaagaacaacccccaccgggacttttataactgcaggaaggtgagcgtgtcagacttttataactgtaggaaggtgagtctgtcagacttttataactgcaggaaggtgatcctgtcagctcagagctgctcagagggaaacacaggtgcagagactgctgagggaccagatgacatttgctgaggaacttacaacttttgcaaattacataggttttagtgaaggcaggtaaattatatctagcagatttgaagtgccatgctgttgcttgtctaagagacaaagaaggaaagaaagagagagagaggtgggggaaggaaaggagagaggagaggagaggagaggagaggagaggagaggaagcttgggagatcttcctcctcaccaccatccagatgtttttttgaagcagggtctcgggtagctcagtcctcaaacttgatgtctatttgaacatgactttaacctcctgatcttcctgcctcctctctagggctgagatttggctgggattacaggcatatgtcagtgtatccaacataatttcaatcttaacttctttgggtggaaaagccgtgatagcatattgggtgctgatgtttgagagaagcaagcatcttccttgcatcccgctaactggctcacactgttgcacaggtgtatagaggacacaaacgggtcccctgggccatgtctaccgactatcagttctcgccattatctgcctctccctccttcttcagtggggtctgcaggacttgtgccactgacagtggcatacagaaggctaatgctgccttttccttttccttctctgaatgtgtgcataggtggatactcacatccacgcagctgcctgcatgaaccagaagcacctgctgcgctttattaagaaatcttaccatattgatgctgacagagtggtctacagcaccaaagagaagaacctgaccctgaaggaactttttgctcaattaaatatgcatccatatgacctgactgttgactctctggatgttcatgctgtaggttgggaggcgctccttttactcgctctattgacagagaaccccagatatcccaggccatccctcccttagcacatccctctcagctaccttagctactgtgatggctgaaagtacccctgatgaggttttgaggtatcactcaccctgaacttcattcttgaagcccatctctttccctgacatcagcctcctgttccacttggtcgcgcctgggactatgcttccaggaagctcagatcatcaaagcttctgctctggtttcctcattcagggacggcagacgttccaacgcttcgataagtcaatgacaaatacaatccggtgggtgcgagtgagcttcgggacctctacctaaaaacagacaactacattaacggagagtattttgccactatcatcaaggtgaggaaaaaacactgcctgaatacggttcgtgaataggggaggagagaaaggaaggcaggaaagagggaagggagggaggggaaagaagggggagggggaggggacacagaggagggagggatcgttggggaaatgtctctgtttccagggtagagaagttaaggtgtaagttaaggtgttaaggtgtaaggtgtaagttacagtgtatatacagctgcactcgtctcgccgccctcatggtgatcttgtcatccttgtctgactcttgcctctggtttctgtcactgctgaagagtctttcgtcctcactcaatcctcggctctctgttcccttagctcttggataatttctctccctcccttccatatttacatgactcctcttcctaaatctgactggtctagacctctggggggacttgtgggaaattctggctttggatctctctcttggattttcaggaggtgggtgcagacctggtggacgccaagtatcagcatgcggagccccgcttgtccatctacggtcgcagtccagatgagtggagcaaactctcctcttggtttgtcggcaaccgtatttattgccccaacatgacatggatgatccaagtccccaggatctagtatgtatctgcaccttccccatggggggggaggggcctctgaagctcattttcctcttcctgcctctgcttccacctgaaccagaaagttagggctcatttacacaaaagtcagctcggctgaaagggctaactgggaagcagctccagaatatctctgtctctgtctgtctctgtctctgtctctgtctctgtctgtctctgtctgtctctgtctctgtctctgtctctgtctctctctctctctctctgtctatgtatcccagtggcctcaaacgtgaaaggagtgggtgtaggagggatacaaccagctccttctctggcccatgacatctggctcccccacagtcgtcctactatgctctctctcctaagttcccttccttcttgcctttagtgatgtgttccgatccaagaatttcctgccacactttggaaagatgctggagaatattttccttccagtgtttgaggccaccatcaacccccagactcactcagacctcagtgtcttcctcaagcatgtaaggctgagccttggggctcttaactcctcctcacaatccagtcggccttgctggccaccaccgactctccctgcttatttacgtccttatattgacttctcctttggagcagtctgaggagcctctgccctcagactgaaccacagcgtggctcacttttctgatagatcactggctttgacagtgtggatgatgagtccaaacacagtggtcacatgttttcctccaagagtcccaaacctgaggagtggacaatggaaaacaacccgtcttacacatattatgcctactacatgtatgcaaacatcatggtgctcaactgcctgagaaagtacgtacgggagaaggggccgaagctctgtcctttaaacatctgctggtgcgtgtgttccactaacgtgtgtgtagtgtgtattgctgcagatgtgccacggggcagacggcaggtcagaggatggctttcaggccttggttctcttcttccaggctactgaggcagggccctccctcgtttctaccaagctaggttctagatgactgagagttcctggcagttctcgccctggccccatctcatctcaggagtgctgggatcacagatgcatgccaccgaatcttgtttgtttgcttttattttacatgtataaatgttttgcctatatgcatgtctgtatctgcgcatcatgtatgtgccttgtacccaaggaggcacacactgagactgaagatgctcatgcacgaggtaatgggctccttgtctcaccatatcctctgctgcctctttaaaaaacactatgtttgtacttaggaagaattacagtgaagagctacaattatgttttgctggacacgtggttgctgttcccttcccaagtgttaactctgctaatggattttttttgtaaatttctctttctttctcacagggaacgaggcatgaatacatttttgtttcgcccccattgtggtgaggctggggctctcactcacctcatgacagcctttatgatagcggacaatatttcgcacggcctgaacttaaagaaggtgagctcagcgcacgctctctccctccctccctccctctctctctctctccctccctctctctctccctccctccctctctccctccctctctccctccctctctctccctccctctctgcaagtttcggggtgagctgtgaggtgtaatcacctagatcagaccattttactttgacaacttaggagtcagatttttaaaagctgattttgcccaatgcttctgaaagcaataccaggacattcaattttaagtagtactgatattgaaacctacatcactgcctaggagatttaaagcgagtggtacctttgttgaaagctaaagcttaaggttggccatgggatttatttgtttgtctttttgtttttcaaagcagggtttcactatgttaccttggctgtcctggaactgaatttgtagaccaggctggcctcaggcttgcagagatctacctacctctgcctgttttaaattgtgggattaaggcgtgtgccactgccaccaggcaaccgtgggattgttaaggttttactgtctgttcctgcccaccatccttattgctattcttactttctttgcagagtcctgtgttacagtacctatttttcttagcccagatccccattgcaatgtcgccattgagtaacaacagcctgttcctcgaatatgcaaaaaaccctttcttagatttcctccagaaaggcctcatgatctcgctgtcgaccgatgacccgatgcagttccatttcaccaaggtaggcatggaagtttaaacaacgccagcacgtgatcactcgccacccagaaactgagagtcaaaccaaggctcttctgaatcctttgtgtagggcgtgtattgttcctttcactaatgcaactcctgatttatgtgactaactacaggagcccctgatggaagagtacgccatcgcagcccaggtcttcaagctgagcacttgtgacatgtgtgaggtggcaaggaacagtgtcctgcagtgtggaatttctcatgaggtagacttgaccgcactcactgctctcctgagtgttgggtctagcaatctgaccactgaatcgttagtgaagcgaggaaaacacaggaaagtactgtataaaccgcttaccgctgctatggatagggactggaagaccatcctgggctggggtatggttcagtggtagggcacaagcctgtgaggatctaatttgagtccctgccactcctccaccaagcactattctctggccatgtctctaccattcaagttctcaggaagcgtgcacccggaggcactagatggacgaccactttttcccttttgtgtgtgggtaacatgaggattatggtggaggtgtgatcgctgcctatcccggggtaaagagacacagagccctctctttcctttgtcttacaggaaaaagcaaagtttctgggcaacaattaccttgaggaaggtcctgttggaaatgacatccgaaggacaaatgtggctcagattcgcatggcctatcgttatgaaacttggtgttatgaactcaatttgattgctgagggccttaaatcaacagaatgaataaagtatgtgaaccgaataacactgtgagtgggttttcattgagaattcgaatcctctagacttgttattgagacccttttttttttattattttcttaagatttatttatttggggttggggatttagctcagtggtagagcgcttgcctagcacagaggtcctgggttcggtgcccagctctggaaaaaaaaagaaagaaaaaaaaaagatttatttatttatcacgaacgagtgctctatctgcatgtacacctgcaggccagaagagggcatcagatcatttaaggtggttgtgagtcaccatgt

SEQ ID NO: 9 - DNA, 480 bp, rat
  misc_feature (392)..(392): n is a, c, g, or t
gccgctcaccacgttttttacaaaataaagctcttcccttccttcctcacgtgccctgcactccagggtgggaggaaaaaccggagggacatcggctacatggcgtgctcctgaggctgggccactgcgtcgcctccccgcggtgaggcctccagcccgccccagaagctgagatttctcctgagcgaggtgagcacctgtacctggaggttggagacgggggcagggctggcagccagagcggcggtagccatggtgcggttcagcagcggattgggtggcgtgctgctaggcgggtgtgtggccttccagtaggcttccaagtactccgccaggtgctcgcaggcatcttccaattggttctcgtccaggattatgtcaaacatttcgangggacactgtgccagcttctccgaggctgctatttggacattgaggtgtttggattgagactccctcgggatttgatgaacctctgca

SEQ ID NO: 10 - DNA, 561 bp, rat
caagtttttttttattattttttcttttttctttttttcggagttggggaccaaacccagggccttgcgcttgctaggcaagtgctctactgctgagctaaatccccaaccccggtgtgtaggactcttaagcatgtttactgtggctctcggggataaaggtttgcaagtacagtctccagttaagccaagactcctttaacattctaaggatccactctgttgctccctttttgtaagtttatatacgtgttctaagcgtaagacactgagtatggtcttcacagtcctattagggccaactgcaagttaccaatcagtgagcaggatgctgggcagacctgtgcacagttggcccacaaagcagataaagtcagtttcagtccatcgcaacccaccacaactcaccccttacctttctaatgagaaaaatggaaaccccaggagaaatgtggtctcaaccagtgtaacactaacgagttctctttaaacgctgctggggtctggtgttatcctacagtctgtataagataagccttttaaaaactcagctgcaatcgc

SEQ ID NO: 11 - DNA, 640 bp, rat
gcagcagccagcctcagacaccatgtcaccaaagaaagccaagaagaggttagagggcggaagctccaacgtgttctccatgtttgagcagacccagatccaggagttcaaggaggccttcacaatcatggaccagaacagagacggcttcattgacaagaatgacctaagggacacgtttgctgccctcggacgagtgaacgtgaaaaacgaagagatcgatgagatgatcaaagaggctccaggtccaattaacttcactgtgttcctcaccatgtttggggagaaacttaaaggagctgacccggaggagaccattctcaacgccttcaaggtgtttgaccccgaaggcaaagggtcgctgaaggccgactatgtccgggagatgctgaccacgcaagcagagaggttctccaaagaagagatcgaccagatgttcgcagcttttccccctgacgtcaccggcaaccttgattataagaatttggttcacatcatcacccacggagaagagaaggactgagccctgaaccacagcctcgggtgacctatagcctgttctccatccccaggccctgctgtcccagcctgtgggtgttcaccatcccagggccctgtgcaaataaacaggaagtcttgg

SEQ ID NO: 12 - DNA, 2316 bp, rat; identical to SEQ ID NO: 1

SEQ ID NO: 13 - DNA, 637 bp, rat
ggaacaccagcaaatccggtactttattaagacatcttaggcttccctgcattttcaaaaacaggaatgctctattgactgaacacatcaaagggtctctgcagagtccttgggggccagccacaggaggtgtcatgtgattctgcagtcccagagcatggcagctagtgcttgcaatcacaggaagcaggcagtcggttctccatctgcctaggggagggtatccttcattcttttgaaggactgccttcaagtcacagctcaattccagtgtgtagactcggtctctaggactggggacaaaggcagctgccaggtgcaacagtttatgaggctccgccttttatatatgccacgggagcccgggctctgggagccagaagcccaagctggaccaaccgctgctgtgggctgatggccttagcagccacataatcttccctttgatgtccagggtcaatgcagtcctggccccaccagggctaggagaaggtgtatgaaagagaatctcactgtgatctgtcctgtgaaggaaacagcaataaaatttattacccagtcaccacagtcattctgacaggagttctcctagcctctgacctccacttgagagggaactttcagggaggacagggac

SEQ ID NO: 14 - DNA, 459 bp, rat
gtacatgagtcatctttatttcaaaaagcatattagttgctctaattttatgtcaatattaaaaacacagaggtaatcaataactagctaaaattacagttaacccattacttgagaatacagatcattcaaaaagtaacacaggatgaaatttataattcgactaaatgtttagcaaaactatgcaattttgtttcccacactataataaaaaaacatacaatggataaattttaatctttcctttaaatcaagaagatacaccaagaatgctaagatggtatagatattttaaacataatccaaagaccataaaaattgataaacactacccatgaatattcttcagatgaaaatccactgagattttatggctgtcctgagtgaacttatacataccatcacccttatcattctatattttaaaaagaaattgaaatagaaaattttgaatcctca

SEQ ID NO: 15 - DNA, 620 bp, rat
tgcttctgacatagttgtgttgactcacaaactcagaaacagacaccatggtgcacctgactgatgctgagaaggctgctgttaatggcctgtggggaaaggtgaaccctgatgatgttggtggcgaggccctgggcaggctgctggttgtctacccttggacccagaggtactttgatagctttggggacctgtcctctgcctctgctatcatgggtaaccctaaggtgaaggcccatggcaagaaggtgataaacgccttcaatgatggcctgaaacacttggacaacctcaagggcacctttgctcatctgagtgaactccactgtgacaagctgcatgtggatcctgagaacttcaggctcctgggcaatatgattgtgattgtgttgggccaccacctgggcaaggaattcaccccctgtgcacaggctgccttccagaaggtggtggctggagtggccagtgccctggctcacaagtaccactaaacctcttttcctgctcttgtctttgtgcaatggtcaattgttcccaagagagcatctgtcagttgttgtcaaaatgacaaagacctttgaaaatctgtcctactaataaaaggcatttactttcactgc

SEQ ID NO: 16 - DNA, 3812 bp, rat
gtccccaccactgccaagctgaaaatcgatgagtttgaatcgaacgtcaatgaggtgaaagacccctacccttcagctgacttcccaggggacgacgaggaagatgagcctgagatcccagcaagcccccgaccacgccctctggctgagctgcagctgaaagagaaagcggtgcccatcccagaggccagctccttcttcatcttcagccccaccaataagatccgcgtcctatgtcaccgcattgtcaacgccacctggttcaccaactttatcctactcttcatcctgctcagtagtgctgctctggccgctgaggaccccatccgggccgactccatgaggaatcagatccttgagtattttgattatgtgttcactgctgttttcactgtggagatcgtccttaagatgaccacctatggagccttcctgcacaaaggctccttctgccgcaactacttcaacatcctggacctgctggtagtggctgtgtctctcatctccatgggcctcgagtccagcgccatctccgtggtgaagatcttgagggtcctgagggtgttgcgaccactccgggccataaacagagccaaagggttgaagcacgtggtgcagtgcgtgtttgttgctatccgcaccatcgggaacatcgtgctggtcaccacgctcctgcagttcatgtttgcatgcatcggagtccagcttttcaagggaaaattctacagctgcaatgatttatccaagatgactgaagaggagtgcaggggctactactacatatacaaggatggagaccccacgcagatagagttgcgaccccgtcagtggatacacaatgacttccactttgacaatgtcctgtctgctatgatgtcactcttcacggtctccacctttgagggttggcctcagctactgtacaaggccatagactccaatgaggaggacacaggccccgtctacaacaaccgagtggagatggccatcttcttcatcatctacatcattctcatcgccttcttcatgatgaacatctttgtgggcttcgtcatcgtcaccttccaggagcagggggagactgagtataagaactgtgagctggacaagaaccagcgccaatgtgtgcagtatgccctgaaggcccgcccgctgaggtgttacatccccaaaaacccataccagtatcaggtgtggtatgtcgtcacttcctcctactttgaatacctgatgtttgctctcatcatgctcaacactatctgcctaggcatgcagcattacaaccagtcggaacagatgaaccacatatcggacatcctcaatgtggctttcaccatcatcttcaccctggagatgatcctcaagctcatagctttcaagcccaggggctattttggagacccctggaacgtgtttgactttctaatcgtcattggcagcatcattgacgttatcctgagtgagatcgatactttgctggcctccagcgggggactatattgcctgggtggaggctgcgggaacgttgacccagatgagagcgcccgcatctccagtgccttcttccgcctgttccgagtcatgcgactgatcaagctgctgagccgggcggagggtgtgcgcaccctgctctggacgttcatcaagtccttccaggccctgccgtatgtggctttgctgatcgtcatgctcttcttcatctacgctgtcatcggcatgcagatgttcgggaagatcgccatggtggacgggacgcaaataaaccggaacaacaacttccagactttcccacaagctgtgctgctgctcttcaggtgtgccacaggggaagcctggcaggagatcctgctggcctgcagctacgggaaacgctgcgacccggagtctgactacgcaccgggggaggagtacgcgtgtggcaccaactttgcctactactacttcatcagcttctacatgctctgcgccttcctgatcatcaacctctttgtggctgtcatcatggacaactttgactacctcacaagggactggtccattctgggccctcaccacctggatgagttcaaggccatctgggctgagtacgacccagaggctaagggcaggatcaagcacctggacgtggtgaccctgctgaggaggatccagccccctctgggctttgggaagttctgcccacacagggtagcatgtaagaggctggtgggcatgaacatgcccctgaatagtgatggcacagtcaccttcaatgccacactcttcgccctggtacgcacagccctcaagatcaagacagaaggcaattttgaacaagccaatgaggagctgagagccatcatcaaaaagatctggaagagaaccagcatgaagctcctggaccaagtcatccctccaataggagatgacgaggtgacagtggggaagttctatgccacattcctcatccaggagcacttccggaagttcatgaagcgccaggaggaatattatgggtatcgacccaaaaaggacacagttcagatacaggctggattgcggaccatagaggaagaggcagctcctgagatccaccgagccatctctggagacctgacggcggaggaggagctggagagggccatggtagaggctgccatggaggaggggatattccggagaactggaggcctgtttggtcaagtggacaacttcctggaaaggaccaactctctgccccctgtcatggctaaccaaagacccctccaatttgccgaaatggagatggaagagctggagtcaccagtctttttggaggacttccctcagaacccaggcacccaccctcttgctcgtgccaataccaacaacgccaatgccaatgttgcctatggcaacagcagccatagaaacagcccagtgttttccagcatccgctatgaaagggagctcctggaagaggcaggcaggcctgttaccagagaaggacccttcagtcagccctgcagcgtctctggagttaacagcagatcccatgtggacaaactggaaagacagatgtcccaaagaagaatgcccaaaggccaggtgcctccttccccatgccagctctcccaggaaaagcatcctgtgcacgaagaggggaagggccccaggtcatggtctacggaaacatctgacagtgagagctttgaggagcgtgttcccaggaattcggctcacaagtgcacagccccagctaccaccatgctgatccaggaggctctggttcgaggaggactagactccttagcagcagatgctaacttcgtcatggcaacaggccaggccctggcagatgcctgccagatggaaccagaggaagtcgaggtggcagcaacagagctactgaagcgagaatccccaaagggcgggccatgcccagggagccttgagcccaaagtcctcccctgggcagcctgaaccagcagtgggggtcccaaaaagacccttattgctccaggtgtgaggcctatacagaatgaaagaagcttagaactgccattaccaaaagtcagaaagcgagggagtggagaaaggttagcgcagcctaggagcctcccctccctcctcagtagccagctgcatggactgagtagccgtggtcaggaaccacctcaaccagggagggggccatggatgggcaggatcgacccttctccttaccagcaagaagcaggacttggcagggcctctgtggtcactcacaaaggcctgattggtgccagggtctttctgtcataaagtcacgccatccaaccagcgtgacattaaagtcgccaggcctgactttg

SEQ ID NO: 17 - DNA, 638 bp, rat
aggtgtccaaggaggtgtttaatcgtgctggatgacacatggtataactgatacaggtgatggttccagggtttagatcacagaatatttacatgcatgaagaagatgagatttctacatagaaagactatctcccggggtcttctgtgtcatgatccaaatatagtggctacacttggaaggttgctaatccgtagactctgggggtgaccaaggccctgagacatcccactttaagagggtgaggatggcattgctcctagctgttcctgagttgttcgtagctacacagctgtactccccctcgtcacctttagttaagcctgttatgaacagattgtggaaccctataccactttcctcagcactgaaccttgatccctggaccactcttccatttttgtaccaagaaacggtgggtctcggtgaaccacggactaaacactggaaatacgccgctgtccctaagggagcacggcaatcagaaatacctttgatgaacctgggagggccttccaccacctggaattcaaaaaagctgtctgcgtatttgctccttaagactagctcctccttctgactgcttaaagtcactttgcttgtcctggtgaccacagcagaggcctgggattctccca

SEQ ID NO: 18 - DNA, 538 bp, rat
tttttttttttttagttgtttctttgagttgctaaagtgatgtcctactgcatgtgtcgcaacactcgggcctcggaaagcttcctctctccccacattggaaggttggtttttttgtttttgttttgttttttgtttgtttgtttaatggttttatcatttaatatggagcaaaacggttgtatccccctcggtatatactagcctgcaatgaagaaagaacgagacccacatcatcagcatggctcctagtcttggcatcggtcaagggcgcaaaagcattctgaaacaaagcaatttgaggggtgtgtttttttacatgttgccttttgtaacatgtggatcatcaaaaagactaatgtaaaaaaaaatagacactcaaaaccaaccaaaatagagggcacccccttccccatcccatgaccttcttagaaagttaatggtggtcactcctgacctcctcctgtaactccttatgaaaaaaataataatcccaggaaactgaactggatctgctggtcctacctaccagctatga

SEQ ID NO: 19 - DNA, 360 bp, rat
tttttttttttttttgtatttcacgatactctgcagctctgtggcttctttgaggtgtagctgttccaggttatcgggtatcgtgtggtagtggcctttgctcttctcatagttcttcttgtactggtaagagctggcgagctggcttgtattcaggacgtgatgcattataagggattccttcatgtcagtcacgggtttgtggagtttcttcaggtcagccttgtatttgacctcacttgcaaggttgttggcatctttcatagttttgtagagctggctgtcttttgggttgtatttgggtgttttgcctttctccttgtcaaagttttctcggtatttaacctggctgctcagctt

SEQ ID NO: 20 - DNA, 6035 bp, rat
tgcttcactctgccacagtcagaggtcccataggtccacagctgctgctgctgctctctgctgtcctgccggtgtgactcagccaacactatgagtagcgacaccgagatggaagtgtttggcatagctgcccctttcctccgaaagtcggaaaaggagaggatcgaagctcagaaccagccctttgatgccaaaacctattgctttgtggttgactcaaaggaagaatatgccaaggggaaaattaagagtagccaggatgggaaagtcacggtggagacagaagacaacaggaccctggtggttaaaccagaggacgtgtatgccatgaaccctcccaagtttgacaagatcgaggacatggccatgctgacccacctgaacgagcctgctgtgctgtacaacctcaaggaccgatacacgtcctggatgatctacacctattcaggcctcttctgtgtcaccgtcaacccctacaagtggttgccggtgtacacccctgaggtggtggatggctaccgaggcaaaaagcgccaggaggccccgccccacatcttctccatctctgacaacgcctaccagttcatgctgacggatcgtgagaaccagtccatcctgatcaccggagaatccggggccgggaagacggtgaacaccaagcgtgtcatccagtactttgcaacaattgcagccactggggaccttgccaagaagaaggactccaaaatgaaggggaccctggaagatcaaatcatcagcgccaaccccctgctggaggcctttgggaatgccaagaccgtgaggaatgacaactcttcccgctttggcaagttcatccgcatccatttcggcaccactgggaagctggcctctgcagatattgaaacttatctgctggaaaagtccagagtcaccttccagctgaaggctgagagaagctatcacatcttctaccagattctttccaacaagaagccggaactgatcgagttgctgctgattacgaccaacccttacgactacccattcatcagccagggtgaaatcctggtggccagcatcgatgatcgtgaggaactgttggctacagacagtgccattgacatcctgggcttcaccccggaggagaaatctggactctataaactgacaggggctgtgatgcattatgggaacatgaagttcaagcagaagcagcgagaggagcaagctgagccagatggcaccgaagtggctgacaaaacagcctacttgatgggcctgaactcttcagacctcctcaaagccttgtgctttcccagagtgaaagttgggaatgagtacgttacaaaaggccaaactgtggaccaggttcaccatgctgtgaatgctctctccaagtccgtttatgagaagctgttcttgtggatggtcactcgtattaaccagcagctggacacaaagctaccaagacaacacttcattggggttttggacattgcgggttttgaaatttttgagtataacagcctggagcagctgtgcatcaacttcaccaacgagaaactgcaacagtttttcaaccaccacatgttcgtgctggagcaggaggagtacaagaaggaaggcatcgagtggaccttcatcgacttcgggatggacctggcggcctgcatcgagctcatcgagaagccgatgggcatcttctccatcctggaagaggagtgcatgttccccaaggcgacagacacctccttcaagaacaagctgtatgaccagcaccttggaaaatccaacaacttccagaagcctaaggtggtcaaaggcaaggccgaggcccacttctccctcatccactatgcgggcaccgtggactacagtgtctcgggctggctggagaagaacaaggaccccctgaatgagaccgtggtggggctgtaccagaagtcttccaacagactcctggcccatctctatgccaccttcgctacgacagatgctgacggtgggaagaagaaagtcgctaagaagaaaggctcttccttccaaacagtgtctgcgctgttcagggaaaacttgaacaagctgatgtccaatttaagaaccactcacccacactttgtgcgctgtataatacccaatgaaaccaagaccccaggggccatggaacacagcctggtcctgcaccagctgaggtgtaacggggtgctagaaggcatccgcatctgcaggaaggggttccccaacaggattctgtatggagactttaaacagagataccgagtgctgaacgccagtgccatcccggagggccagttcattgacagcaagaaagcttgcgagaagctcttggcttccattgacatcgaccacacacagtacaaatttggacacaccaaggtgttctttaaggctggcttgctgggaaccctggaggagatgcgggatgagcgtctggccaaactgatcactcggacacaagccgtgtgcagagggttcctcatgcgtgtggaattccagaagatgatgcagaggagggaatccatcttctgcatccagtacaacatccgcgccttcatgaacgtcaagcactggccctggatgaaactcttcttcaagatcaagcccctgctgaagagcgccgagacggagaaggagatggccaccatgaaggaggagttccagaagaccaaggacgagctcgccaagtcggaggcaaagaggaaggagctggaggagaagctggtcactctggtacaagagaagaacgacctgcagctccaagtacaggcggagagtgagaatttgctggatgccgaggagcgatgcgaccagctgatcaaagccaagttccagctggaggccaaaattaaagaggtgaccgaaagagctgaggatgaggaggagatcaacgccgagctcacggccaagaagaggaagctggaggacgagtgctcggagctgaagaaggacatcgatgaccttgagctgacactggccaaggttgagaaggagaagcacgccacggagaacaaggtaaaaaaccttaccgaagaactggcaggcctggatgaaactattgcaaagctaacacgggagaagaaggccctccaagaggcccaccagcagaccctggacgacctccaggctgaggaagacaaggtcaattctctgagcaagctcaagagcaagctggagcagcaagtggatgatttggagagctccctcgaacaagagaagaagctgcgtgtggacctggaaaggaacaagaggaagctggagggagacctgaagcttgcccaagagtccatattagatctggagaacgacaagcaacagctggacgagaggctcaagaagaaggactttgaatatagccagctgcagagcaaggtggaagatgagcagacgctgagcctccaacttcagaagaaaatcaaagagttacaggcccgcattgaggagctggaggaagagatagaggcggagagggccacccgggccaagacagagaagcagcgcagcgactacgcccgcgagctggaggagctgagtgaacgtctggaggaggcgggcggtgtcacctctacccagattgagctgaacaagaagcgtgaggctgagttcttgaagctgcgcagggacctggaggaggccaccctgcagcacgaggccaccgtggccacgctgcggaagaagcacgcggacagcgcggcggagctggcagagcagatcgacaacctgcagcgcgtcaagcagaagctggagaaggagaagagcgagttcaagctggagatcgacgacctctccagcagtgtggagagtgtgtccaaatccaaggccaacctggagaagatatgccgaactctagaggatcagttaagcgaggccaggggcaagaacgaggagacgcagagaagcctaagtgagctgaccacacagaagtcccggctgcagacagaagcgggtgagctgagtcgtcaactggaagaaaaggaaagcatagtatctcagctttccaggagcaagcaagcctttacccaacagatagaggagctcaagaggcaactggaggaagagaacaaggccaagaatgcgctggcccacgccctgcagtcctcccgccacgactgtgacctgcttcgggaacagtacgaggaggagcaggaaggcaaagccgagctgcagagggcgctgtccaaggccaacagcgaggtggcccaatggaggaccaaatatgagacggatgccatccagcgcacggaggagctggaggaggccaaaaaaaagcttgctcagcgccttcaggattcggaggagcaggtcgaggctgtgaatgcaaaatgcgcttccttggaaaagaccaagcagaggctgcaaggggaggtggaggacttgatggtggatgtggagagagccaactctctggctgccgctctggacaagaagcagaggaactttgacaaggtgttagccgagtggaagacgaagtgtgaggagagccaagcagagctggaggcggctctcaaggaatcccggtccttgagcactgagctcttcaaactgaaaaacgcctatgaagaagccttggatcaactcgaaactgtgaagcgagagaataagaacttagaacaagagatagcagatctcaccgaacaaattgctgagaacggtaaaagcatccacgagctagagaaatccagaaagcagatggagctggagaaggctgatatccagatggcgctggaggaagcagaggcagctctggagcacgaagaagccaagatcctcaggatccagcttgaactgacgcaggtgaaatcagagatcgatagaaagatcgcagagaaggatgaagagatcgagcagctgaagaggaactaccagaggacagtggagaccatgcagggcgccctggatgctgaggtgcgcagcaggaatgaggcgatccggctgaagaagaagatggagggcgacctcaatgagattgagatccagctgagccatgccaaccgccaggccgcagagaccatcaagcacctccggagtgtccagggacagctgaaggacacccagctgcacctggatgacgctctccgaggccaggaggacctgaaggagcagctggcgatcgtggagcgcagagccaacctgctgcaggctgaggtggaggagctgcgggccactctggagcagacggagagggcccggaagctggcagagcaggagctgctggactccaacgagagggttcagctgctgcacacccagaacaccagcctcatccacaccaagaagaagttggagactgacctcacacagctccagagtgaggtggaggatgccagcagggacgcaaggaacgccgaggagaaggccaaaaaggccatcactgatgccgccatgatggcggaggagctaaagaaggagcaggacaccagcgcccatctggagcggatgaagaagaacctggagcagacggtgaaggacctgcagcaccgtctggacgaggctgagcagctggcactgaagggcggcaagaagcagatccagaaactggagacgaggatcagagagctagagtttgagctggaaggggaacagaagaggaacacagagtctgtgaagggcctgaggaagtatgagcggcgtgtcaaggagctcacctaccagagtgaggaggacaggaagaatgtgctgagattgcaggatctggtggataaacttcaagtgaaagtcaagtcctacaagaggcaggctgaggaggctgatgaacaagccaatgttcatctcaccaagttccggaaagcccagcatgagctagaggaggccgaggaacgtgcggatattgcagaatcgcaagtcaataaactgcgggctaaaacccgggacttcacctctagccggatggtggtccatgaaagtgaggagtgagcatgtcctcctggtgaggggcagaagatatgcagaatgtatgttttcgtggctcctgaccatcctgcttaatttccacgtaacccctttccacatgcaataaaatttgccttgtttcaagt

SEQ ID NO: 21 - DNA, 477 bp, rat
tttttttttttttttttcacacaatagattttattttacaagatgctagccatttatttaacaaaatggaaatctctgatatctagcacttttctacatttacattgtcagagaggagacgcttacattctacagcatacgtgataataaaagaatccattgtaaatttagatcagctaaaacattttctctaatgactaggattcattatcctccagtgaggtaaggtgacgtttgctttgtaagaggagatgtggtagggacaccgccctccctcccctctcatctagatattgggtatttgatggatagaacaggtgcaagtccttttctctggtcaagtgtaaatcccttgaatttaggaaacaactccaaccatgaaccaaaggtgaaggctgcttccacccgctccgctcacacactgctccataaggcacgaggaccctggcttccctcacatgctgactgcaaagcctg

SEQ ID NO: 22 - DNA, 1318 bp, rat
gtcaccgcactaattaaatgccatctgggtggctcctctgggttttttgagtccatcacccagttcagatcagtcagaggccaaggaggagaacatgatgatggacctttttgaaactggctcctatttcttctacttagatggagaaaatgtgactcttcagccattagaagtggcagagggctctcctttgtacccagggagtgatggtaccctatccccttgccaggaccaaatgccccaggaagccgggagcgacagcagtggagaggaacacgttctggctcccccaggccttcagccaccccactgcccaggtcagtgtctgatctgggcttgcaagacttgcaagagaaaatctgcccccacagatcgtcggaaagcagctaccctgcgcgaaaggaggaggcttaagaaaatcaacgaagcctttgaggccttgaagcgtagaactgtggccaaccccaaccagaggctgcccaaggtggagattctgagaagtgccatcaactacattgagcgtctgcaggacctgctgcaccggctggatcagcaagagaaaatgcaggagctgggggtggacccttacagctacaaacccaagcaagaaattcttgagggtgcggatttcctgcgcacctgcagcccgcagtggccaagtgtttcggatcattccaggggcctggtgataactgctaaggaaggaggagcaagcgtcgatgcttcagcctccagcagtcttcagcgcctttcttccatcgtggacagtatttcctcagaggaacgcaaactccccagcgtggaggaggtggtggagaagtaactcagtcagcatttggaacattcttcgctcagcaggaagagcccctttccgcctaatcatttagattagggctcacagaccccagaatttatgaaaggcaagagacttagtgttaaaaaagaaacctctccccacctcaagtgaaaatccttcggcttggggcttttattataactattattgtatctgaaccgctagtggcttagctctagaaccctaattttgtttttagtttggttggttttttataacatattaacttttgctatgatcacgtgaccctttcctgtcagttgcaaacgaagttcattcctgtctaaatcaaagtgggaacgtttaatcctaagagtatttaatgtacttttgtaaatagtcttagtactttcgtttttatgtaaacctaaaggacatattttaaatgtggaattaagcattgtatataaaatgtgtgagagtctgatattgtaatattaaaatattaatacgtttctacac

SEQ ID NO: 23 - DNA, 541 bp, rat
aaaaatagactatgtcagaccatgcacaatgagagttcatttaatttattaaatgtcccatgacaactttgcttaatataggttttggtttgggctaaggtggcatggaaggcaacatagtaacgacatccaccatccacgtctactctctaagcaccaagacccaggatgattagtctccagagcaaaaggtactgtgcagatgtggttaatctacagaccctgagaaggatatcatcccaggttacccaggtgggtccaaccaactcacaaaaggccccgaaactccccagcagtggagaaccagacagttagtccatgacaagattcaacttgatgctgctggtcttgaaggggatagaagaagagctaagaaaaattggtggcctctagaagctgagaagggctcttagttggcagctgtaagaaaacaggaatttctaccttaccatcgtagggaagtgaattctgccaatagcttgaaggaacaggaggtgagccccaacttccagaaaggaacttagcctgggtcttaatctaa

SEQ ID NO: 24 - DNA, 490 bp, rat
accttttctttctaagcttttattttttgatattacaaaccagttttctttattcacaaaccactgtaagtgatataaacactaatttctaaagacagatatacacattttctgggtttgcagattgagtgatgtgtgttaagaagtcactatatgccacattaatcttttttccataattcataatagcaatagttatttagataaatgaaaacattccaaataaatactgttgttttaaaaaatccaaaatgtttgtttacacctctgacatgacagtttaaaacgacttatcggcagctcagcggagtgcctagacaaaaggttctgcgacatcggttggcacccacttgctctaaatgatttttattaaaactacatacggtcgtgggggaaagtacagttcgttgatggaaatcaaaaccgcatatgagttttactttagccagcacagtaagaattccatgtttgtgatttcatacacaatgca

SEQ ID NO: 25 - DNA, 1782 bp, rat
ggcacgagctcagaaatgacaggaaaagccacccctgaggcttctgtctctacttcagaggggacagcacctgagcctgccaaggtgcccactccagagccttctggacaggtggcagcatcagagtccacggggcaagagcaggctccagagccacagaagcagcctcaggcacaggaccctgcagcccacgaagctcccgccacacctgccaccactaagcctgaagctccgagcgaagatgtccccagtgccccactgcagctgaccttggaggatgtgagccacagctccttgactgtgagctgggagcctccggaggacctgggaagctggggctccagggctatgtgttggagctctgtcagagagggagcctcagaatgggtacctgtgaatccccggcccgtgatggtgacccagcagacagttcgaaacctggctctgggagacaagttcttcctgcgcgtgactgcagtaaactccgcaggggcgggccctccagctgtgctagaccagcctgtccacatccaggagatcactgaagcccccaagatccgtgttccccgacaccttcgtcagacctatatccgccaggtgggagagtctgtcaacttgcaaatccccttccaggggaagcccaagccgcaggcctcttggacccacaatggccacgccctggacagccagagagttaatgtgcgcagtggggaccaggactccatcctcttcattcgctcagctcagcgctcagactcaggccgctatgagctcactgtccgtctggaaggcttggaagccaaggccgccattgacatcctggtgatcgagaagcccggcccccctagtagcatcaagctattggatgtctggggttgcaatgctgcccttgagtggatgccaccccaggacacgggaaacacagagctcctgggctacacagtgcagaaggcagacaaaaagacagggcaatggttcacagtgttggagcgataccaccccaccacctgcaccgtctcagacctcatcattggcaactcgtactcttttcgggtcttctcagaaaacctgtgtggcctcagtgacttagccaccaccaccaaggagctggctcacatccacaaggcagctatcactgccaaacctagagagtttactgagcgagacttctcagaaccgccctccttcacccagccggtggctgaccgtacctccactcctggctatagcacgcagcttttctgcagcgtccgagcgtcacctaagcctaagatcatctggatgaaaaacaagatgagtatccagggggaccccaagtatcgtgctgtctccgagcaaggggtctgcaccctggagatccggaagcccagcccttttgattctggggtctacacttgcaaggccatcaacgtgctaggagagcctgccgtggattgtcggttggaggttaaagcctctgccacacactgaagaccaacacaggcagagactgggacaaggagacagcttggtcacataccaggatcgcgacggacattctctgccaggtcctgcagacctgaggatcaggcgcccaggcatccccaagaccaagataccacaagaacagctaatgggggtgaacctccagaacctgctggctctctccaccagaggttgggtccagacccaggagtgggcctggcgggccccaggtcatacctcctgggtatgagagggccccaagggtgcagagactggcacccctctgcagaattgtacactgtgtgagaatatccaata

SEQ ID NO: 26 - DNA, 1849 bp, rat
tgcagccagagtgccagggagtgggacaggctgctggaggccacaccagcgtccacagcccatggagctcaccgctgtcctcctgctgctgggcctctgctccgctggcactgttctgggctccgaacatgagactcgtctggtggcaaagctctttaaagactacagcagtgtggtccggccagtaggggaccaccgtgagattgtacaggtcactgtgggactgcaactgatccagcttatcaacgtggatgaagtaaatcagattgtgacaaccaacgttcgtctgaaacagcaatgggttgattacaacttgaaatggaatccagatgactatggaggagtgaaaaaaattcacatcccctcggaaaagatctggcggccggacgttgttctctataacaatgcagatggagactttgccattgtcaaattcaccaaggtgctcctggactacaccggtcacatcacctggacccctccagccatctttaaaagctactgtgagatcattgtcacccactttcccttcgatgagcagaactgcagcatgaagctgggcacttggacctatgacggctctgtggtggccatcaatccggaaagtgaccagcccgacctgagtaacttcatggagagcggagagtgggtgatcaaggaagcccggggctggaagcactgggtgttttactcctgctgccccaacaccccttatctggacatcacctaccacttcgtcatgcagcgtctgcctctctacttcattgtcaacgtcatcattccctgcctgctcttctccttcttaaccagtctggtgttctacctgcccacagactcaggggagaagatgacgctgagcatctctgtcttactgtccctgactgtgttccttctcgtcattgtggagctgatcccttccacctctagcgctgtacccctgatcgggaagtacatgttgtttaccatggtctttgtcattgcgtccataataatcaccgtcattgtcatcaacacacaccaccgttcgcccagcacccacatcatgcccgagtgggtgcggaaggtttttatcgacactatcccaaacatcatgtttttctccacaatgaaaagaccatccagagataaacaagaaaaaaggattttcacagaagacatagatatctctgacatctctgggaagccggggcctccacctatgggctttcattctccactgatcaagcaccctgaggtgaaaagcgccattgagggtgtgaagtacattgcagagaccatgaagtcagaccaggagtctaacaatgcgtctgaggagtggaagtatgtcgccatggtgatggaccacatcctcctcggagtctttatgctggtgtgtctcatcgggacgctggctgtgtttgcaggtcggctcattgagctacatcaacaaggatgagcagaagctgaactaagcctccctctgccccagctgcagccaccaccaggaaagatagaagagaggaaggcctgtctacttgaatcctttcgcgcttaccaagcacacagtgtgctacatgtcctgttaatgatagtggtctctgctcacactgctatgtccttaaagtatctcccctttgcttctgcttttaacaccatgggtctccttaaagagggaaccctttgtagtaaataaaagtgagtcctcgggctggagagatggctcagcggttaagagcacccgactgctcttccagaggtcatgagttcaattcccagcaacacatggtggctcacaaccatctataaagagatctgatgccctcttctggtgtatctgaagacagctacagtgtacttatatataataaaa

SEQ ID NO: 27 - DNA, 580 bp, rat
agagagggatctttttattttattttcttaacgtgtatcagtgttttgcctgcgcgtgtatctgtgcactacaaatgcccacagaggctggaagaggccatcgattcactgtgattggagagttacgagccacagtgttgctgctgaagctcagagctctgcaagagcaagtgctcccgacacctgtccctccggcttcaagaagccctctctaaccccctcccctacctacgacatcagaaacacagtcactgctgtttgtgacagagtcctgctggctttcaatttgccatccccctgcctcagcccctagatgctgggattacagtcatgcacccacaccctcaggattactgggggctttgaaaaggcagttagaggcaaacactaactgaaaacctcgcaggcatggggaatctgcaaccttaaagagggggccttcaggagtggattgcagggctgaagttccacagacttcccaagatcctctactaaatcctttgcaaatcctatcctgttcccggattccctaaacctgagcttactcctggaacacttggcccaaactcagcctcgtgcc

SEQ ID NO: 28 - DNA, 541 bp, rat
tttttttttttttttttaggttgcaagtcctggtctggtttatttataaagcaataaatatttgaagcacaaacaaactgcacgtgtgtaaacaaactgtacaatgactgatgggagatgggagagggcctcagaggattccaagcacaatactgtcgtcctgagtgtaaggtagccgcctcagaagcacttgcggtggacaatggagggcccggcctcatcgtactcttgcttgctgatccacatttgttggaaggtagacagagtatttacgctcagggggagcaataatcttaatcttcatggtgctgggagccagtgcagttatttccttttgcatacgatcagcaatcccagggtacatggtggtgcctccagacaggacattgttggcgtacaggtctttgcggatatcgatgtcacacttcatgatgctgttataagtagtttcgtgaatgccggcagactccataccaatgaaagagggctggaagagagtctcaggacagcggaaacgctcgttgccaatggtgatgacctg

SEQ ID NO: 29 - DNA, 1502 bp, rat
aggaaaggccatggctaaggagtggggttacgccagccacaatggtcctgagcactggcatgaactttatccaattgccaaaggggacaaccagtcacccattgaactgcatactaaagacatcaggcatgatccttctctgcagccttggtcagtatcttatgatcctggctctgctaagaccatcctgaacaatgggaagacctgcagagttgtgtttgatgatactttcgacaggtccatgctgagaggtggccctctctctggaccctaccgacttcgccaattccatcttcactggggctcctcggatgaccatggctctgagcacacagtggatggagtgaagtatgctgctgagcttcacctggttcactggaacccgaagtataacaccttcggagaggctctgaagcagcccgatgggattgctgtggttggcatttttctgaagataggacgggagaaaggcgagttccagattctccttgatgccctggacaaaattaagactaagggcaaggaggctccttttaatcacttcgacccatcgtgcctgttccctgcttgccgggactattggacctaccatggctccttcaccacgccaccctgcgaggagtgcattgtgtggctgctactgaaagagcccatgacagtgagctcagaccagatggccaagctgcgcagcctgttcgccagtgcagagaatgagcccccggtgcctctggtggggaattggcgccctcctcagccgatcaagggcagggtggtgagggcctccttcaagtaaggctctggacgtgccctcttcgggaaaggaattctgtccctgaagagccagcttgcctcctcctggtgctccctgctccaagctatcctacaacactgagagaaagaagagacgcagtcagatgaaaccgcagtgccttttgacatgatctaacccagaagcatgaatttcacacctaacctttttaataactaccttttctaaaaaaattagtatttctagtataaattcagtgaagaagaaatagatggaaaaataacgacagtgacagtggcttattaagcatattaagtttctcagaatctcagcactcctgttttcaggctgagttactgacaagtgatgggtccatgctatgtatgtgggtatggaggcatgtgcccaccttaccacatttgattgaaagcacaagttaagatcactgtagatttcagaaggtgaatacataatgtttacctcaaataataccatcgctactctatcactttttaaaaatttgcctactaccaacttcgcctggttttaaattaccgataaacacacacccataaggccaggtcttttaaattttttgatccagcatttaaatttcttcttcataaagatggttttctttgcccaatctagggtcatttattttttatttcactactttaatctttgcatgcctattaaaaacaaagcaaaacaaacaaacaaaaaacaaaac

SEQ ID NO: 30 - DNA, 1353 bp, rat
ccccgcatcccggtcaccagttcaggagacaaagacacagcctcccacaatgtcctacagacgagagctggagaaatatcgagacctggatgaggatgaaatcctgggggccctcacagaggaggagctcaggacactggaaaacgagctggatgagctagaccctgataatgcactgctccctgcaggcctgaggcagaaggatcagaccaccaaggcacccacaggcccctttaaaagagaggagcttttggaccacttggaaaagcaagcgaaggaatttaaggaccgagaagacctggttccctacacaggggagaaacgaggaaagatctgggttcccaagcagaagccaatggatcccgtgctggagagcgtgacgctggagccggaactggaggaggccctagcaaatgcctcagatgccgaactatgtgacattgcagctattctgggcatgcacacgctcatgagcaaccagcagtactaccaagccttgggcagcagctccatcgtgaacaaggaggggctcaacagtgtgatcaaacccacacagtacaagcctgtgcctgatgaagaaccaaatccaacagatgtagaggaaacgctggagcgaataaagaacaatgacccagaacttgaagaggttaatcttaacaacatccggaatattcccatacccactctcaaggcgtacgcggaaagcctgaaagagaactcctacgtgaagaagttcagcatcgtggggacccgcagcaatgaccctgtggcatttgctcttgctgaaatgctgaaggtgaacaaggtgttgaagacgctgaatgtcgagtccaacttcatctccggagctgggatcctgtgcctggtggaagctctcccccacaacacttctctggtcgaactgaaaatcgacaaccagagccagcctttgggcaacaaagtggaaatggagatcgtgaacatgttggagaaaaacacaacactcctcaaatttggctaccactttacccagcaggggccccggctgcgggcatccaacgccatgatgaacaacaacgaccttgtgaggaagaggaggctcgcagacctgacggggcctattattcccaagtgccgcagcggtgtctagtgcgcaaagggacgcccacgcctataagctggacgtgttctaccgatggtgtgtgttccccagtggagaccaggaggcaaatgttggcgtgaactcttgtggttcagttctttgtgcactaaggtttagggtaactagtgactgtagttggaccttttataaaatatggttaatgtgaaggttttctttagtcacagaagttcagtctgataattatttaaaaa

SEQ ID NO: 31 - DNA, 579 bp, rat
tttttttttttttttatgagtggcttaattttattcacatggaactcaagggactggcaaagacgtcctcctacatttcttccgaagggttggatgggtctgatggcagacagcaagttgggggatgtgtgtagacataaaccagcggcttgttgttactctgcatcataaaaatccagtttatttttaacctggtggcttgaatagtacatttgctagggaacaaacctcaggctcaccggctggcaagctttggacagcctacaagagcagcatctttataaaaaccctccaaggacctagtgcagcggtgtgacaggcattgtgagtgtgaatcagaggtgctggaggagccaagagcagcatcccatgtcaacagagcagtggaagctcagggcacacagcagtcactcccgggagtgtggcatggcccctcagtattgataggacctcacgaggagccacatgaggagcacagtgatcaggacaactgtgaagttgataaacagctcctgggtagaccgctccatcttcagaaggtctgggtgagaactccaggaggacttctgagtgcacacc

SEQ ID NO: 32 - DNA, 3996 bp, rat
  misc_feature (652)..(652): n is a, c, g, or t
aacggatcaaggccagactgtgaggtaacaaataaaactcaccgcagagagtactgatgaatgtgatggccagaaaagtgacagtgaggagcacccaaattagccacctcgttgaaaccactgtggccagacaaggtcagtcaagcagactgggacaaaggctgagggttgaccactgataagctgttgatactgcctgggacagtatgagacccctgcccccaaattcctgttggggtcattacacaagctgagtagtaggcagcttcaatgtggcagggtgctggccactgttccatgaaggactccagtaggctaggctacggggctatatgttctctcgacctcaagggagatatttttgggacaacgccaggccctgtctaagggattccaaagtgggagttgtggtgaggctgtctttggagaatttcaggacgagtgcgggtgcggggtgaggcgaacgtgcgctggaaagatccagggtggaggtggctgcgggggctggcgggtccttgtactgttggttgacagagtaggggcgggaattcgggcggccaacgtccagttagaaaaagcccgggctagagggcccgaagcaccgggtgtgggaggggggtggggggtgggggtggggggtaatggggaaacnggggaagatgggagtgctggaggagagttgtggggtccgaggagcacctcgcatctggagtctggcaggagtgttgaaggactgaggggctagctcgggcagggcaaaggcagcaggacctgggaggaaggagcatggtgtggttcccaggcattgcagaggctggaaaacatcggtgtggggttgaagggcctgagctagggttggagaggaacggggagccagacattcatcccggtcacttttggttacaggacgtggcggctggtcggatacaggggagctgctgggaagggttcgaccccagacctgggcagtgaaggtgtagctggcagcggtgggcaggtgaggaccgccgtctgctgggcaggtgagtctccttcttctctcttggcctcgctgactgaccttctaaaaggtttagagagcgaggccgctgagaagaagcagctgacctcccaacagaatggcacatagaaaggcaggacagttagcaaaggagacatcgtctcggggggagccgagacagaacaaggctgggggaccattgggcaccccggagtggaaagagcttttagagagaagatagaagaggtgcagggctgccagtcaagactgaggctgctgcctccaggcaagtgataggaggccttggagacagtggcagagactatgggatccagcaagagcagaagcattctaggctggggtcaaacagggcaagatgggggtcacaggacacagatgggtccccagccgccaccacatcccacccaccgtaattcatttagaagcaggttcaagagtggctctggcagggcttctgaggctttgccagagcttcgatggccggagaacgggaaagaagggcagtgcagggtgtcaacaggaagggaacgggggctgcaggtatcggactccagagggattttacagcaaggaggctgcagtgggtccagcctgcagacacaccattcccatgaggcactgcggcccagggactggtgcggaaagggcccacagtggacttggtgcactgtatgccctaaccgctcagtccctgggtctggcatgacagacagaacatttccaggggagtcaagggcacaggatgaagccagacaaggcgaggcaggtggggcagaatgaatgagctttctagggagggaggttgggtgcaggtagagcgaggtaaagcagctggggtggtgagccagcgaggcactggcctccagagtccgtggccaaggagggcttgcgggcggcgacggagcagtgatcggtgtctcggagagctcggactggagactagggtaagtgtctgtcccactagtggccacccagtttcctcccactcaagtccacttaactcatgtcttcttttctccccacagccaggtctctagcagaagtggatgtgcctgccagtcactgaaggcgaggatgacaggtgtggtcaacgtgatagaaagacatgacatggtccggtgtgatggagaggacagaaggacagtcatccagccttcctggtgagcatactccctgccacagggctagcccgctcaaccacctaatttgtcacccactcactccagattctgtcctttgcagaacaccgtgggctggtgccgtgggacactgccgtagaagccgtctgttctttcctttgcccaaagagctaacacatctctgctgctctctggatcctcttccccctaccttgaaccctcaagatgaaaggtgaggatctcctgccccacatgggctaggtggcaggctgcaagtgcaggggtctcattctctcccacccacagaaatggtgctacccagctcatgtctgggcctttgaatccggggacttctttaagtccgtctagttctgaatcaagaatatgctgcactcagaaccactacactacctgcctcaggaatcggctcgaaggtgagtcagggcgccctttggcagctcggcaagcctactccaagcctactctccctccccacatcccctcaggccccctccccctgcccagcccccctcatttgtcttttttctctttgcaggtaaagctgaaggaacagacggtgacaacatcttgaaagagcagacccacacagcacccacccacccctgagactccatcttcatggccaactaactctgcctggcccgggagaccaccacccacatcatcctggagccaagcctctagcccgggatgacttcatcatctccctcctgtcttttttcttcttcctcctttcctgtaactctatatttctttccttttgttccttctctgcttgagagactcaaagcatccgtgactctgctcccccactcaccccttttgaatttgcactaagtcgattgcactggtttggagtcccggagatagcctgagtctctccgtatggatgtatacagcgagtgtgtaggcccctttggctatgttgccccagtgcccgcccgtcatccacttctgtctgagggcaactgggtgtggccgtgcgcttgaggcctcaccttccccttgcctagtctggaagcagttccatcataaagtgttcaacgcaccttccttcatcctttgtccctcctcaccagggcctcaccagaggtcctgggtccaccaataaatacagttacagtcattggtctcgtgcacttgaatataatgcgactcacttggggggctggggggcaggggaaagaaatgagggaaggggaataaaagggatggggtacagcacccataatgaaggggattatgaagtagggggcatctaggatggaatgaagaataggagatgggaggggcttatgaaaaggacggtggcattgggatgggaggccatgggagggggctcatgagataccaagaagctacagtatggaaggggcctatgaatatgaaatggtgcctaaggaatgagcagcgcagtagacatcacagtggagagtggcagagtgccatgaggagacagaggcaaggctgtgaggagggtccctcaagactggggaggtgaaggacagacatccttagcaatgagagagtggtggcctgaccagaaacctggattctacactgctgccagtcctgtctggatgactccccgagtcctcacacttatcccaactcctgaagcctactgtcaactgcaaagtgaacctgactcccgactcctcgcagaggctgctaatgaggtagacagctatatgtgaggctgggtagaccacagccacataaaggagcccatggtggcccctgggcttccctctcctgctctgagcatgctcagctctggactggagcccacggtagatgcctgcagtggtacca

SEQ ID NO: 33 - DNA, 1789 bp, rat
ggaattcggcacgagagagagagtgcgagaccgagagagaaagacggagagcagcagacagaaactgcccgcacccgctagctttagcagccctcagcgtggaccctctggcaacttggcaccctcaagatccctgcggttccaaccagacccgctccacggcgctggctgtgccagcccgagcctcggcggcctggcagtcaccctgggaagcggtgggtcggggagacagccgttctctctggtagccgataacggggaatggagaccaattgtcgcaaactagtgtcggcctgtgtgcaattagagaaagataagggccagcagggaaagaatgaggatgtgggcgcagaggacccgtccaagaagaagcggcaacgccggcagaggactcactttactagtcagcagctccaggagctggaagccactttccagagaaaccgctacccagacatgtccactcgcgaagaaatcgccgtgtggaccaaccttacggaagcccgagtccgggtttggttcaagaatcgccgggccaaatggagaaagcgggagcgcaaccagcaggccgagctgtgtaagaatggcttcgggccgcagttcaatgggctcatgcagccgtacgatgacatgtaccccggctactcgtacaacaattgggctgccaagggcctcacgtcagcgtctctgtccaccaagagcttccccttcttcaactctatgaacgtcaatcccctatcctcccagagcatgttttccccgcccaactccatctcatccatgagtatgtcgtccagcatggtgccgtccgcggtgaccggcgtcccgggctccagcctcaatagcctgaataacttgaacaacctgagcagcccgtcgctgaattccgcggtgcccacgcccgcctgtccttacgcgccgccgactcctccgtacgtttatagggacacatgtaactcgagcctggccagtctgagactaaaagcaaagcaacactccagcttcggctacgccagcgtgcagaacccggcctccaacctgagcgcttgccagtatgcggtcgaccggccggtgtgaagcccagggcgcgggattccgaggactgtcggagtgggcaactctgcccgagaaagactgagaattgtgctagaaggtcgtgcgcactacggggagaaagagggggggacaaaagagatcagaggaaaagaaaccactgaattcaaagagagagagcgcctttgatttcaaaggaatgcccccaagtgtctgccatcttccgctgaaagtattcccaacagttggaggacgcgtgcaccaacaaatgtttgactggatatgacattttaacattactataagcttgttattttttaagtttagcattgttaacattaaaatgactgaaaggatgtatatatatcgaaatgtcaaattaattttataaaagcagttgttagtactctcacgacagtgtttttaaaggctaggctttaaaataaagcatgttatccagaatcagttaggatttttcgcttgcagcaaaggaatgtatatactaaatgccacactgtatgtttctaacatattattattataaaaaatgtgtgaatataagttttagagtagtttctctggtggatgccttgtttctgaaactgctacgtacaacctatcctgtgtataacatttcgtacgatattgttttacttttcagcaaatatgaaaaaatgtgttttatttcttgggagtaaaatataccgcatacaaaaaaaaaaaaaaaaaactcgag

SEQ ID NO: 34 - DNA, 5925 bp, rat; identical to SEQ ID NO: 3

SEQ ID NO: 35 - DNA, 440 bp, rat
  misc_feature (300)..(300): n is a, c, g, or t
  misc_feature (369)..(369): n is a, c, g, or t
  misc_feature (374)..(374): n is a, c, g, or t
ctggtcagaaggcaagcccggcaggaggcggcttaacggtacttggaggtcagcacagtgctcacagaggcaaggaatttgtccagagaggcgtgcatggcgggtgtgaaatctccagggtggtggcaagccaaggtcaccagcaggcagtggctcaggaacttgaagttgacaggatccacacgcagtttgtgggcatgcaggtcgctcagagtggacagggcaccaggcaggtcttcgacgtggtctgcagctttggccaaggcatcagcaaccttcttgccgtgagccttgacctgnggaataattgcaatccccgatccccatcacgaatggggttcaacgggttacccgcgcctgccggcgtanggtangcacacgctgagccagtcagtgtagcgcgcgtgcaggcccggacatctaagggcatcacagacctg

SEQ ID NO: 36 - DNA, 443 bp, rat
tttttttttttttttttagagtttcctcaggactttattgaacaaaaaggacaggaagcactccatcccaggtgtgctccattccaggcatcttagacgtttcccgaggtctccggcttctctttctccagatgtttcttttgggggcccatgaaggccctcttctcctgcgctgtctggaagcatccgtggccaaacttagaagtggtgtcaatgaacttgagctcaatattctccagggccctgcggctgtggtgcactagtagggacttcctcagtgtgatcactctcttcttggtgccagcaatgcagccttttaacatgacgaagtcattgttcacttccccgtagtgggggaagccacccaggggtgtgatagacttgtcggttacgtcatagctggtagatgcgttgtttctgaccatcttcccgtcttccatgtg

SEQ ID NO: 37 - DNA, 885 bp, rat
actctcttctctgcttcttcccgcctctctgtgattacagctccaatggcccccaaaaagccagagcccaagaaggacgatgccaaaaccgctgcccccaaagcagctccggcccctgcggctgcacctgcggctgcacctgagcccgaacgccctaaggaagcagagtttgatgcctccaagattaagattgagttcacgcctgaacagattgaagagttcaaggaggccttccaactgtttgaccgcacacctaagggcgagatgaagatcacgtacgggcagtgtggggatgtcctgcgggctctgggacagaatcctacccaggcagaggtgctccgcgtcttggggaagcccaaacaggaagagctcaactccaagatgatggattttgaaacgttcctgcccatgctgcagcacatctccaagaacaaagacacgggcacgtatgaggacttcgtggaggggctgcgggtcttcgacaaggagggcaacggaactgttatgggtgcagagctccgtcatgtgctggccacgctgggtgagaggctgacagaagacgaggtagagaaactgatggctggtcaagaagactccaatggctgcatcaactatgaagcatttgtgaagcacatcatggccagctgagcctctcaggaagcccagggcaggccaagctggggacatgccatctcccaaccataatgctgacaccatgtctggagcttcgggaaggaaaggagtgtccagactccagcacatggtgcagatcactccgtgtgcggtggtcctcgctggcccctgctaggtatgtgcttgcctacccgtggtaccctttctgtctccaccctgcggccttatgaataaatgatttccttccttctg

SEQ ID NO: 38 - DNA, 602 bp, rat
ccaggtaacaacctacacttgagcctttattgcgttctgatagggtcaggggttacagaaggagcatcagaggtcgctctccccgtagagggcagaggagaaggcagtgtagtccagggccccggggacactgcctgggcctgagtatgggggcattctcttgatgcagtactgggcctgatccggaggcagctctcgacgaagttcctctgccaagatgtaaggcttatcagaagccagaatccggaaggaggcgatgacctgttctgcagtgtccgtgtctgcggtctctctagtcatgaagtcaatgaaggactggaaggtgactgtgccttgtccgttggggtcaaccagagtcataattcgggcaaactcagcttcacccaagtcatagcccatggaaatgaggcaggctctgaaatcctcatgatccatcaggccattcttcctcctgtcaaagtggttgaaggaggctctgaactcattcatctgctcctgggtgatgcccttggcatctcttgtcaggatctgggtctccacctcattgatggttctggcgatagttgtgagcagcaactcccatccgacacggatatgctcca

SEQ ID NO: 39 - DNA, 5925 bp, rat; identical to SEQ ID NO: 3

SEQ ID NO: 40 - DNA, 289 bp, rat
ctgccgcatccttttccggagcagggccagagcaacacagccgaaaaattgcagcttgtgaatttcttctgtttgaatccccccatgttgtcctgtttacaagttaacctaagttggggtatctgtcatgggtcttcctgtttttgtatttaaattctaaaatatcagcaagctgttccctgagtagtgtttttgcctgtgtgtgcagtgccggccccacggcacgcactttagtaagttatcaactcacgctgtgaacctgccaatctgctgtaacaactctgcttta

SEQ ID NO: 41 - DNA, 3996 bp, rat; identical to SEQ ID NO: 32
  misc_feature (652)..(652): n is a, c, g, or t

SEQ ID NO: 42 - DNA, 892 bp, rat
ggaccggagagggacagagcactccagctattccagccacatgaaaagcactggaattgagatctcagctcagaggacaccgggagttccttctaccctgtaaagcgttttctgtttttgcacctggctgcctaggactgtcctcaggcagtaaacaaatccagagagcaggtataagacctcttgaacatgtcgaagcagccaatttccaacgtcagatccattcaggccaatattaatattccaatgggagcctttcgtccgggagctgggcagcctcccagaaggaaagagagtacccctggaactgcggagggagcacctgctactcccgaggaaaagaagccagttcctggaatgaagaaattcccaggacccgtcgtcaacctgtctgagatccaaaacgttaaaagtgaactaaaatacgtccccaaaggtgaacagtagttcaaaggggtcagaaggcttgacgtgctttctcaatggaaaaaacaatgggttgaaataaacaacttcatgagaattttatatatttgtatgatgatcacaaacttcctgaatgcccaagactctagcaaaaaatatcctgtttgtacatttatatttcttccttctacttggctgcatttctcactttagctacatttttggcaccttgcagagcaaatgagcacatgaatttaccacctggggagtgtggttttgaggagagatgtgatttttatggaggggggtacagcaatgtgcatgcagtgattttgatattaagtacttttaagttacttcccacagtcttttggtcaatatttgaaatgtcttcttcaccttttaaatgatctcaattaactttttatgagttgaaataaatatttgagtaaatgtaaaaaaaaaa

SEQ ID NO: 43 - DNA, 671 bp, rat
cacagacatatacacatttgctcagtactcagagccgtttaggacacagtggaaatgattaccacttaggtgatgtactaaatgacaggttccctgcctcctcagtcatctatgaaaactcactacaataccacagcatgctggttcaactgctaagtttacctttcacttagcagagtaagattggtttgatatgtgacaaaccaaggcacggaccgtttgggaaactttctgcagcatcacacaggaacgaagcgttgcacctaagagttcttcagtcaaatggccattatccttttccagtctaattactgtggctgggataaggtaaaatacacctcctagactttcacatagaccatgcccaacacagcaccagcctttcatcaacagtcctcagtataagcactgtaccctaaggattttctgaggtggatggtgaccctattgttgataacctaatatggctctattttaaatcttccctctttctttcctccctccctcccctcttatactccttccttcctttcttgatggttttagggatagaactcaaggccttgaccatgctaagcaagctgtgtcaccaagtacagctctaagcttttttcccccttgaaaaatttcataaatatgcccagtaattttcattttgaaaatgtaaacta

SEQ ID NO: 44 - DNA, 647 bp, rat
tttttttttttattttgttttgagtaaatgaatttatttctatactggaaatccttgccttgaaacaaaggaagtttcaagcctttctaagaaattactaaagccacttgagaaggatgccagctgaggggcacctggcacagagaggacacccgagatttgagtgaagggaaatgacaacagacatttccagttcacagccctggcttgcctgcagcagactgctgtgacaaccattcccggggccatgtttggactagctaagaacggtagaaactgaatgatctaggagtcattacccagcagatgtgtttcgaaggtctccattgtgctcagtacccatctaggcactagggatggaggtgggtgtggctttctgcctaaaatggcactgataggctggtgggagccttgttttgaccacaaaacaagcagagtgggaaatctgactgtctaataaactcttgcttttgttttttggtttctttaaatctcaggcacattttggcttatcacgtgactccacaggtatgatagataatgcaaagtgttttgtcgcttcggggatggggggtgcctatagcaagatcctctaagattaagagggagttcatttaatggatttaccaggatggctgatatggatg

SEQ ID NO: 45 - DNA, 433 bp, rat
tgtgggcactctgttgcttgtgtgaggaactttctggcatgtggataattattgccaactagagttcaggcacccatgcaactgttttgtagcgtgtgcagaacacccttagttccgacacgacacattgcttctgcaccctgaaaacctgctatcggaaaagtttctatccttggagtgtgagctttcagtaggaggcctcatcactgtgtttgcataacaatcttctcgcctccactccgttgcaatgttattctgagcaagtcttatgccaaatgccatgtacaatgtctgtatggaagattaaactgtgctctggtgtggtaaggccgtttagttgccgacttcgtagttggaagctgatattccagcactgagtccacgatgtattcagaaatccaagttggcgtcgcacgtttcattctgatgtgaa

SEQ ID NO: 46 - DNA, 853 bp, rat
tcatctcggcagattgactttggcccctgagtcttcaccatgccgaactggggtggaggtgcaaaatgtggagcctgcgacaagacggtttaccatgcagaagaaatccagtgcaatgggaggagcttccataagacctgtttccactgcatggcctgcaggaaggctctggacagcaccacagtggcagctcatgagtcagagatctactgtaaggtctgctatgggcgcaagtatggccccaaggggatcgggtttggacaaggcgctggctgcctcagcacagacaccggcgagcaccttggcctgcagttccaacaatccccaaagccagcacgtgcagccaccacgagcaacccttccaagttctctgcgaagtttggagaatcagagaagtgcccacgatgcggaaagtcggtatatgctgctgagaaggtcatgggaggtggcaagccctggcataagacctgctttccgtgcgccatctgtgggaagagcctggagtccacaaatgtcactgacaaggatggggagctttattgcaaagtttgctatgccaaaaattttggccccacaggcattgggtttggagggcttacacaccaagtggaaaagaaggagtgaaacggcgtgctttctcacagccctgctagtcaacagcagggcttagtgaccccatagatgtaactttggccccgcagcctcctttgtagctggactgcatttctcttcagaagcagtcataggctgcactgaccgtaaaaagagaccaccggaaatgaatctgcaaaagatgcttcattatttactatttttggggtgggagagacaataaacgttttaatggtaaaaa

SEQ ID NO: 47 - DNA, 711 bp, rat
aaaatatagaatgataagggtgaacttatacataccatcacccttatcattctatattttaaaaagaaaatgaaatagaaaattttgaatcctcaagaaagtgaaaccattttctgtgttatcgatactgtaagaaattctgaagcaatgttggtaactgcatctgggggataagatgcaacctttgtcttcctatgtagttgcggatgcagagtcggcagagttggcaaagagagcttggagtagcttcatgttgaagaagtattctttctacagcactgttagatgtcaccaggtcgacaggccgcaaaagttctgtgttcttggcattgatgtccgctccaaattctatcaataagttcacaatttcggtactgggctgttgagcagcagcatgcaagggagtgtcccagtacttgcccttgtgtacatcagcacctgtatgtaaatagggaggtcagcataaagaagcttccagatgcaatgaaactgttgtgacatacaagctacataaagaggagtccccaagtgaggaatgtcttggtcaatgtctacgccccaggctatcaaaacgttgagacattcatggtgacctttgctggcagcctcatgtgttggagatggaaaacaggactccagttgggctttggcaacatactccaaaaggagctctgcacagcttgcactgccttgagagcatgcgttgaacaa

SEQ ID NO: 48 - DNA, 1374 bp, rat
aggcctgccaccagcgccagcccagctgaacccagccgcccaaagcacgcctacagatcccacagaagctgtaccaggatgtgtgacgacgaggagaccacagctttggtgtgcgacaatggctccggactggtgaaggctggctttgcgggtgatgatgctcccagagctgtcttcccatccatcgtgggtcgcccacgccaccagggtgtcatggtaggtatggggcagaaagactcctatgtaggtgacgaggctcagagcaagcgaggcatcctgactctgaagtaccccatagagcacggcattatcaccaactgggacgacatggagaagatctggcaccacaccttctacaatgagctccgtgtggcccctgaggagcacccgaccctgctcactgaggccccactgaaccccaaggccaaccgtgagaagatgacacagatcatgtttgagaccttcaatgtgcctgccatgtatgtggccatccaggcggtgctgtccctgtacgcttctgggagaaccacaggcattgttctggattctggcgacggtgtgactcataacgtccccatctatgagggttatgccttaccccatgccatcatgcgtctggatctagctggtcgggacctcactgactaccttatgaagatcctcactgagcgcgggtactcctttgtcaccaccgctgaacgtgaaattgtccgagacatcaaagaaaaactgtgttatgtcgccctggattttgagaatgagatggccaccgctgcatcttcctcctctctggagaagagctacgaacttcccgatggccaggtcatcaccattggcaacgagcgtttccgctgtcctgagactctcttccagccctctttcattggtatggagtctgccggcattcacgaaactacttataacagcatcatgaagtgtgacatcgatatccgcaaagacctgtacgccaacaatgtcctgtctggaggcaccaccatgtaccctgggattgctgatcgtatgcaaaaggaaataactgcactggctcccagcaccatgaagattaagattattgctccccctgagcgtaaatactctgtctggattgggggctccatcctggcctctctgtctaccttccaacaaatgtggatcagcaagcaagagtacgatgaggccgggccctccattgtccaccgcaagtgcttctgaggcggctaccttacactcaggacgacagtattgtgcttggaatcctctgaggccctctcccatctcccatcagtcattgtacagtttgtttacacacgtgcagtttgtttgtgcttcaaatatttattgctttataaataaaccagaccaggacttgcaacc

SEQ ID NO: 49 - DNA, 463 bp, rat
cacacatcattgagtggcagcgtccagccggacactgttggagactaccaaacccgtcactgacccagtcttgggccaggccagctctgtggcccaagtctggtagtactttggtctctaccaccacaccagagagagtctatatagcaaatgtggtaacttgtaggtgccctgcacttagcatagcaccttctgtttcttacgtgatctcaagttgaaccaacttcgttaactctgctgtcccctgtaatcctaacttccctcaggggaattggagactggtggccacatcatgcttattgaatgtctagtgaacagcatatcggtgcctcttaatggcatgggcaaggcgtgctctatactgaagactgtgtcttcacagtgctcataggacgtgggtgtgtgtataaatgtataatatagatttatatatgtcgctatggctatgtgttgaaggccagca

SEQ ID NO: 50 - DNA, 1502 bp, rat; identical to SEQ ID NO: 29

SEQ ID NO: 51 - DNA, 1998 bp, rat
acgcggggccccaaccccctgcttgttgtccaacttctcacggagcagcgggagagcaagcggcaggactcggctgaggaggccaccatggcagagcttcaggaggtgcagatcactgaggagaagccactgttgccaggacagacgcctgaggctgccaagactcattctgtggagacaccttatggctccgtcacttttaccgtgtatggcacccccaaacccaaacgtccagcgatattcacctaccatgatgtaggactcaactataaatcttgcttccagccactgtttcagttcggggatatgcaagagatcatacagaacttcgtgcgggtccatgtggatgcccctggaatggaagagggggcacctgtgtttcctctggggtaccagtacccatctcaggaccagcttgcagacatgattccttgcatcctgcagtacttaaatttctctacgataattggagttggcgttggagctggagcatacattctgtcacgatacgctctgaaccacccggacaccgttgaaggtcttgttctcatcaacattgatcccaacgccaagggctggatggattgggcagcccacaagttaaccggccttacgtcttccattccggagatgattcttgggcaccttttcagccaggaagagctttctggaaattctgaattgatacagaagtatagaagtctcatcacacacgcgcccaacctggagaacatcgaactgtattggaacagttacaacaaccgccgagacctgaactttgagcgaggtggtgagatgaccctcaagtgccccgtgatgctggtggtaggagaccaagcacctcatgaagatgccgtggtggaatgtaattcaaaactggaccccacacagacctcattcctcaagatggcggactctggaggtcagccgcagctgactcagccaggcaagctgacagaagctttcaagtacttcgtgcaaggcatgggctacatggcctcatcctgtatgactcgcctgtctcggtctcgcacagcatctctgaccagtgcggcatccatcgatggcagtcggtcccgatcccgcaccctgtcgcagagtagcgagtctgggactctcccttctggacccccggggcacaccatggaagtctcctgttgagcgaccctctttgccttggtgtggaacccagccctcacctcccgcagcactaacttaagaggtgttttcagggcaatgggccagagtcagcaaggaaaatgggcagattgtgcagggagatgatgaccttgatctttaattgctaccctaaccttgacctttaacctgtgatatcctctagctcctcggtgaggtgtcctaatatctcttagagatccaggccccctaagtcatctcctcctcccgttttggtcttgagaaggcttttatgttccctctctgacctgggttctatagatgaggaacaataagttgttttagctgtcacggggatgccatcactccccctctttagcccatatttgcaagggtaggagagtgtgtgtatgtgtagggttggtggtgggatatgaggagctccattcccccaaagctgaaacagtgccttgacgtttaaggcctctgaaggcaatgctcctaaatggatgtctctcaggggaatatttgctggtgtgttactgatccttaacgtgatagacatatccagcatgtaaaaagaaagtcagaacgggagatggtggccagtgaagaacaatggtaaacacattgaagcaggggcattagggaggggcccgggtcctttggccgcactaactttaatagctgtcagtgtgcacctaaagtgggactgggggaaagaacttaggtccgactgcttggggtttggcatcagggtgggaagggctacctcagactctgaccatactcttgtgtgtagggtgtgacctcctgtctcacacaacttctgctgtgacaataaaagatagaggaaactga

SEQ ID NO: 52 - DNA, 511 bp, rat
cactaaggaaagccagtaactttactgaattgtctgcaaaatacaaattataccttatttccagcaggagaaacttttgaacatttcccacttgaattcactacagacagctgaatttaagtcccttgagatacacgcgtgcggttagcttaggtatgccatcttgtcatccagtggagacaaagtccagcttatgccgctgtgagcctctattggaatacttgttgcaaatgcttgaatgccctcatttacaagctattttaattattgtcattgaatggaaacaagtccccacacaaggaaaatgatgaaaaaacggtacggaaaaccatctgaagcaatccaagctctaagcctacggtgacccttgtctgcatactcgaatactgacgcattcaaacgacagccagaatccaccgcttaggcaacctctccgaattaaattgaggtatcaatcaatttgcggtatgaacagggaaggcaaaatgcaatacccgattatgaataacca

SEQ ID NO: 53 - DNA, 339 bp, rat
tttttttttttttttttgggacacatgagttctttattgaaaaccaaccctgggggtggaggcccaaatgggtaacccaatggtctctgcgcaaatcctcaacatcccttggctcccgggcgtgcgccctggatcaaagtcggatcagtgcaaaccttctggcccgtccaaccgctcctcctccaaccctgtgttgccctcttccccgtccaaagtcacctcgtcaacctcttcaagctccatgctctcaaaacctggctccggccgtccaaccagctccaccttcgacattgccccgaccttgttgatcaactccttggcctgctggaggtaaaaagc

SEQ ID NO: 54 - DNA, 328 bp, rat
tttttttttttttgggtagcaaaggctttattggtccagttcaggatcacctgtccccaactgcctggggaggagcttgcagtgggaaaaggcacttgaggtgggggagggccagctgcagacctcagccaagctggtcctcaaacggctttcggaaacagtctccagcagggaaaaagtcccaacacctcccctggtacatcttccagacatatgacccctgaccggtgtgctctgtctcaaccttatttatcaaatacatcaggaaaaacatgtaattggctaggttgtgcccttccaaagtgggggtctcaaacccatgtggggt

SEQ ID NO: 55 - DNA, 134 bp, rat
tttttttttttttttttgggacacatgagttctttattgagaaccatccctgggggtggaggccgagatgggtatcgcgatggtctctgcgcaaattctcagcatcccttggctcccgggcgttcgctctggat

SEQ ID NO: 56 - DNA, 166 bp, rat
tttttttttttttttttggcttgaaggaaaattgctttaatgtgtttctgcctaaagtgctgtttcaaaggctccaagtctcaaggcttcacaagcatccttaaggttgggtaacacaagatttaatcctcaatcaagcccttggcgccaatgtcacgggtcctgg

SEQ ID NO: 57 - DNA, 504 bp, rat
aaagatagtaaaacttgggatttatttattcagtcataacttaaagcttaactacttcttctccgagcatagacagtcttctgtaccatggtcctatgtaggtatttagtcaggagagtgaagagttaacagatggaaaaggtctctggggcagtccatttgctgagacctcaagtgggacagggcagtgagcagagacatctgaccagggcactgtgggtaaggtaggggtgcctcagacttggccctgctactctcgctcctaaagaactatacccttcaagcctcagcatctcacaccccaatccctcaggctctgcttcctggatgcccaactctcaacagggctgccaaccactaagacagacacagctgctatgtcccacctctcctcagcagttaaaaaggaagagactaacggggagcctcggagtttcacttactggtcacagttcgctatgatgccatcatcagtgtaaacaatgttgctttagctgtgtaaga

SEQ ID NO: 58 - DNA, 518 bp, rat
tttttttttttttttttagcacagggaatagaatatttatttgggttttagaagtccaagggcaacagggttggtcactgggtgatggtctacagctttggtccccagtatcttatctgcaggttcccctggggacccagcctggtagctccctgcctcaggatagctgtcccaagatggctctgctggaactgtaagttcatgagcatggcctgaggacaccagagatacccaagcccgaagatgccagcctgcaaggcccaagactcatgctacccctgagagcaatggcatcccagctctttcttgctgacccagatgctgtgccttctctcttccccatggagactgtgtgctaatctgcagaacaagagcttgcccactcagatcagctgacactcagatcacacggaaggaaagagctctttgttgtgtggcctcctagtgtcttccagcatgtcactctgtattctgggctcaggtttggcagtggttacagtggtcacattggggactgg

SEQ ID NO: 59 - DNA, 491 bp, rat
caaactttcaatgcaaagtttaagtgaaatcttcactctgagatacaaagggttaatgaattactaagtctctgtctctctctttctgtctctgtctctttctctctcacacacctatacactcaccacccccctcacacacctatatacttacctccccccacactctcacactttggatgatcttgggagggtcgatgacgtgaactttggcagacaaaggaacattgtaggcatctggtgtaaacacatattcaccttcgtcttcaatgagagcattggctatgactaacttgtggattccttccttgtgaacgaccttcagacgttccccctcctgaacagggagtccattttttgtccattttcctggtacattttcagagatttcacacttcaggcatacttcttgtccaagttttacagtctgatcagtcagaggcgttgtgatctttacaggtctcaagtcaacacttagtttagccgatgac

SEQ ID NO: 60 - DNA, 396 bp, rat
tttttttttttttttgtgagaatagcttttaatttaaaactatcaaagcaataaattatccatctctttccgttacagccaagtagtctcccaaacacttgaagtagtttccacaccaactgtgactagtgcaaaataaataaataccaagtcttccagccaccaacagtaacactgctgagcagacggacacaggtcaggctcagcctctgtgcaagcggaggagctgagatccacacagcctttccacatgcccagctgggaacagaatacaggacacggggagagggaccacaagagaatgttgcctgaattgaaagcagtatgcccaaacctctgccccagctaacatccacagcacctggaggatgctgggaaaacagttgctaatctaca

SEQ ID NO: 61 - DNA, 2626 bp, rat
cgcttccctgttcacctctgtatttgagaatccgacgccatctgccaccatggtgaacttcacagtagatcagatccgtgccatcatggacaagaaagccaacatccggaacatgtcagtcatcgctcacgtggaccacggcaagtccacgttgaccgactcccttgtgtgcaaggctggcatcatcgcctctgcccgagccggtgagacacgcttcactgacactcgaaaggatgagcaggagcgctgcatcaccatcaagtccactgccatctccctcttctatgagctctccgagaacgacctgaacttcatcaagcagagcaaggatggctctggcttcctcatcaacctcattgactctccaggtcatgtggacttctcctcagaggtgaccgctgctctgcgtgtcactgatggagcactggtggtggtggactgtgtgtctggtgtctgtgtgcagacagagacagtgctgcggcaggccatcgctgagcgcatcaagcccgtgctgatgatgaacaagatggaccgggccctgctggaactgcaactggagcctgaggagctctaccagaccttccagcgcatcgtggagaacgtcaatgtcatcatctccacctatggcgagggcgagagtggacccatgggcaatatcatgatcgatcctgtcctgggcactgtaggctttggctctggcctgcatgggtgggccttcacactgaagcagtttgcagagatgtatgtggccaagtttgcagccaagggtgagggccagctgggtgcagctgagcgggccaagaaggtagaagacatgatgaagaagctgtggggagaccggtattttgacccggccaacggcaagttcagcaagtcagccaatagcccagacgggaagaaacttccccgcaccttctgccagctcatcttggaccccatcttcaaggtgtttgatgccatcatgaacttcagaaaggaggagacagccaagctgatcgagaagctggacatcaagctggacagtgaggacaaggacaaggagggcaaaccactgctgaaggctgtgatgcgtcgctggctccctgctggtgacgccctgctacagatgatcaccatccacttgccgtccccggtcactgcacagaagtaccgttgtgagctgctgtacgagggcccacctgatgacgaggccgccatgggtattaagagctgcgaccccaaaggccccctaatgatgtacatctccaagatggtgccaacatctgacaaaggccgcttctatgccttcggtagagtgttctctggggtggtgtccacaggtctgaaggtccggatcatgggccccaactatacacctgggaagaaggaggacctgtacctgaagcctatccagaggaccattctgatgatgggccgctatgtggaacccattgaggatgtgccctgtggcaacattgtggggttggtcggggtggaccagttccttgtgaagaccggcaccatcactacctttgagcacgctcacaacatgcgggtgatgaagttcagcgtcagccctgtagtcagggtggcagtggaggccaagaacccagctgacctgcccaagctggtggaggggctgaagcggctggctaagtctgaccctatggtgcagtgcatcatcgaggagtctggggagcacatcattgctggtgctggagagctgcacctggagatctgccttaaggacctggaggaggaccatgcctgcatccccatcaagaaatctgaccctgtcgtgtcctaccgggagacagtcagtgaggagtccaacgtgctctgtctttccaagtccccaaacaagcacaacaggctgtacatgaaggccaggcccttccctgatggcctagcagaggacatcgataagggtgaggtatctgcccgccaggagctcaaggcgcgtgcccgttacctggccgaaaagtatgagtgggatgttgctgaagcccgcaagatctggtgctttggacctgatggcactggtcccaacattctcaccgacatcaccaagggtgtgcagtacctgaatgagatcaaggacagtgtggtggctggattccagtgggccactaaggagggtgctctttgtgaggagaacatgcgtggtgtgcgatttgatgtccatgatgtgaccctgcatgctgatgccatccaccgaggaggtggtcagatcatccccacagcgcgccgctgcctctatgccagtgtgctgactgcacagccccgcctcatggagcctatctacctggtggagattcagtgtcctgagcaagtggtgggcggaatctatggtgtcctcaacaggaagcgtggccatgtctttgaggagtcccaggtagctgggacccccatgttcgtggtcaaggcctacctgcctgtcaatgaatcctttggcttcactgccgaccttcgatccaacactggtggccaggccttcccccagtgtgtgtttgaccactggcagatcctgcctggggacccctttgacaacagcagccgccccagccaagttgtagctgagacccgcaagcgcaaaggcctgaaggagggcatcccagcgctggacaacttcctggacaaactgtag

SEQ ID NO: 62 - DNA, 497 bp, rat
tttttttttttttttttcacagatgaggttaatattttaatctatacatcactttttttttttgcaaaccattacacttttatttaaattaactttttcttgcaaaatattcatttcatttttccaacaaaatcttataaaggcaaaaaataaaatcttattttggcaaatgtcatgaagttgatactggcagcatatggagttagttaaaaacagacagtaacttctaaatatattcaaggattttttttcttcttcttttaagcatagtcaaagacaaatttttgtttaaaatgtggctccgcccaatgaaggtgtttttttgttctcattgtttcccgcatgtagaatatcatgagacatgttaaataaagggccccctcctcctcagcggggctggtgtcaagtcacaatcctgtgtcccggccctgcctgccctcctcaccatacggagtcaatggaaactgtccgggctttccccacagcagacagcaaag

SEQ ID NO: 63 - DNA, 401 bp, rat
actccatcccaggtgtgctccattccaggcatcttagacgtttcccgaggtctccggcttctctttctccagatgtttcttttgggggcccatgaaggccctcttctcctgcgctgtctggaagcatccgtggccaaacttagaagtggtgtcaatgaacttgagctcaatattctccagggccctgcggctgtggtgcactagtagatgcgttgtttctgaccatcttcccgtcttccatgtgcagcccccggccaatgcggtagatcttcttgttcagctctgtacggtggtggtaacccttctgcccagcccgggcgatggagcagcctactcgggcagggtgccaggcaccaatacaggccaccttgcgcaggcctttgtgggtcgtcctaggaagc

SEQ ID NO: 64 - DNA, 536 bp, rat
ccccaatgaggcacatttattaaaacataaattattaacttaaaagcaatccaccttctgcgctgtagatggctggcatacggggcgagcaggatggcaggacgaatataaagtgaccacactgagaagcagagcaaaggtgtctacatctgcaggctggccccggctgcttctactgctgagactagctctgctccttccttctagacatacaggggtcattcctcacagaccactcttgcagcctggaaactcccccctcccccgccaagcccattctgttatgaacatgggactttctccttcaggaatctctgcctttggaaattctctgatcatcaaactgtgagccttcctcttcttcaattatcccatcatctctggatgctgaggcccctattgcagggatcacactcgagtctggcatcagttgctgcacaacaggatcctgccggcagcactgaaccgggtatgtctgcaacaaacagaccgagcatggccggagacactgcttccgtgggttggtcagcagaacc

SEQ ID NO: 65 - DNA, 588 bp, rat
actaaagtccacaaatttctgtaagacaagtactttaatgaaatgttttcaaagaaatgttgaacaatatatgctctagtctgcagaatgtgcagttcaaatgtccatacctaattattaatgtgcattaaaatcagcatagagctgttttgagttttaaccataatgaaaacccaggactcctaatttcatcaaatgtgtttacaagcaataataaattcagacccactgtattatgcaatacacatctctagaaagcaacataaaacagtgagatcagatcagtaaaaatatacacacagttaaaagaaatacacaaagtactatagttttattaaaaactactacttgagaaagaaacctttccacaaatagcatgaaagtgtaaaatggtgaaaggaatgtgggaagctttacaaaagcctaattccaactgtatcttcccgagggcggtggcaaagggtacttccttccttctctgggatatccctgtcgccctcctcgatggtcatcacgtctgggtggatatcctccgggcccagccagcatctggtactgatttggctgaaaggctgcattttgggtttg

SEQ ID NO: 66 - DNA, 593 bp, rat
aataaagcagaaatgtgtttattaggcacccttgctcctcacagaggagtgggatccagcccaaggcattctctctgagctccatggaggcttgtaggtgtcactggagagtgtaggcatagaaccagccaccatcccaagcagaacactatttggatagagttagatcaccagaggtagccctggcatgaaacagggcaagcgcctggactccacaaatactgagtgagaggggccctcctggacacacacccaaacattggcagatcaggggatctgaccctgaggcataagctaccctgagccagtaaggagggaagggagccacagagcatagggtccctagtggtccctcacccgaaccaggtcccaaggaccctctctaaattggcccgcatcctcctggccacagctgctgccttagtcccacacatagggatttctaaagacctgagagatcttgccgtctttcgttggcgtggccacctggtggctctggaccatgtacatgtcttcagctcgcagggttgagttggcactgcccatcacctggctgttggcggtggcccgtgggaggatgacgtcgtacgcac

SEQ ID NO: 67 - DNA, 591 bp, rat
agtaatcaaagcctttattattctattaataaacaaccgaatggtcttttcccaacaaaacaacatcatttgtgagggcagaggttctgtttctggtgtacacattccagccttaactctcacggttggcctgctaccagcgcaccagtaggcagtctccattctccacagaataaaactgtaatggctgcaggtcattttctagttcgatttctctgcccggcatcttggaactttcgtaggacaacagaagttctgacacaggaaccttgagaagacgtgacagcagtccctttaccttttgaattgtcatggagtctggcaactgcttttctaatatttgttgttcaggttgatttgagcattttatcttcagtgttagtagctgattttttagcatgaatggctgctgtgttttgagctcctcatcttcaggtgcaccatatttacctggacgtactgcagcagagaagctggtatcttggatgggccgagagaaactctgcacttggcctgtttctgtctggatctgggtgtccaccagcctttctccattcttttccaaaggcttttcgataatcaagctcagca

SEQ ID NO: 68 - DNA, 665 bp, rat
ccccaaatggtatttttgttctttcccttactgtctacttcaaacaaattttatacagttttataattcctttaacatatggctactgcctaccagctccttatgtgcattggcaaacagccaccatgcaccactgaagaatgacttcctggatgagttttcaagagccttccttcatccatatttctacctgtgttcaacttcttaacgtagagttagattagacagtccattccttatactccttctgtctccctccttcccacttcttcctgttttgttagtatagtcttcttttagcctaggcagagtaatgtatgctgtcagtgttagtagaggatttttttttttttgtcaataatgcgagtataaaacttgtttgggtaatcccaattgcttctagcttttgacatctatggagtcctcgtctgcccctttttaattttgtatttctgcctgttcaaaactccttagagcagaaaatgtgttggctttgtaagccttattactcctattgagaggtcgtgtggattcctgtttcggaaaaatatattttacttaacagtaatagagacgtgagctaggcatacacattgacacaaaggagggaactcggaagaaatagatgctttgagataaaacacaaggttagagacaacaagaag

SEQ ID NO: 69 - DNA, 2208 bp, rat
tgtgctgaacagggccacactggtcactacagagaccaaaggcgtgtcccgtcttctataccctgtgtccatttcctgccgagaagcctgcttcaaccttcccagcctagatcctgggattcttcacttctgagcccacacctagatcctgacttccaaaccagccttcaattccatccctttctacctagagtctccttcaggggggcccttgtccggggccatggccctaagggtgggcctgggacttgggcagctggaagccctgtttattctgctccttattggattgctccagtcaagaatcggagctgatgggactgaagcttcctgtggtgcagtcatccagccacgcatcacaggtggtggcagtgcgaagcctggtcaatggccctggcaggtcagcatcacctacaatggcgtccacgtttgtggtgggtctctcgtgtcaaatcaatgggtggtgtcagctgctcactgcttccccagagaacacagcaaggaagagtatgaggtaaagctgggggcccaccagctggactccttcagcaatgacatcgtggtccacacagtagctcagatcatctcccactcgagctaccgtgaggagggctcccagggtgacatcgcgctcatccgcctcagcagccctgtcaccttctcccgctacatcagacccatctgcctccctgcagccaatgcctcctttcccaatggcctccactgtactgtcacaggatggggtcatgtggctccttcagtgagcctccagacccctaggcctctgcagcagcttgaggtaccactcatcagccgtgaaacctgtagctgcctgtacaacattaatgcagtgcctgaagaaccccacactatccagcaggacatgctgtgcgctggctatgttaagggaggcaaggatgcttgccagggtgactctggaggcccactctcttgtcccatagacggcctctggtatttggcaggcattgtgagttggggtgatgcgtgtggcgcccccaaccggcctggagtatatactctgacttctacctacgcttcctggatccaccaccacgtggcagagctccagcctcgcgcggttccccagactcaggagtcccagccggacggccacctctgcaaccatcatcctgtcttcaacttagccgcagcccagaaattgtcaaggcccatacttttcctgccactgagtctgaccctgggcctcttctccctttggcttgaacattaagctacttaatcctcaaagttgaccatgcttccacgaccacagcacgcccaaggacatgtgcctgttcaggaggtcagcacgccgacttgatctttgagcccactcttctgcatttgctccttgggattataatttaatctagggccaagaagtttacagcctgtggaatggaccaggactctagccacctttctctattatctgcagtttattggttaggctcctatggagctcccagaagcctcacttcaacctgtatttagcacacagcagctgcctagctgactgctgcagaaggctggcttcagggccgacccaccctgcctgatgagcccttcacttcgtcctcttcctgcctccagggctttgcctgtctttctgacagggaagacagcagccttaatctcctggactccggaggactgagcccccaccggagctggctggggctggggtcagggtgaggagtaaaaggaggaaggaggaaatgtttttaacacaactggctggatgtgaaatgaaatgaagaatatcacccttcagcacttcttcctgcctccgaagtccagcacaccagcagaatttgctttattaataaatgacacaaaacaggtctgtacacatatttacaggttagaggccaggaaacacagatccaaagaagggcacaggccattcacttcttggagagcttgacttgtttgtgcttcgggggtgcccacttgaggcagacagagtccactgtgggaggaaagaggaatgagaggtcagcaggacctctgggccaagtctgcttacacctggctgcccctctgggcccaggccaggtttcaccttcacgggatgagaacaaaagggagctttggacctggggggaggggatcccaggaatgagtaaccacctctaggctgctgtcctagaaactggttcaactggtttggatcttgaggagccc

SEQ ID NO: 70 - DNA, 504 bp, rat
tttttttttttttttttgagaaatagaaagctattttattaacacgctttacatttacagttcattagctaatcaacatcaacatgcaaaaataagcgctagatacaaacctctacaatatggttttgtgtgaattacaatggttcatgtctggaaaacccgtcagtacttactttagctgaactatcagtttccgtaatgaaaagcatgtacactctaggactacggaaccacctggcaaggcctctgcagaaactcagtccagtggctttcccgtgaatacattctcaaagcaggagataaggcggtgctggaaggtgagacgctgaacctgtgcacagacacagccccagacaccctggccacaagggcagctcggaagcgtttattcagtgtctcatagggcaccttgagggtcgggtactcctgcaccttcagggtcatggacagctgggccgccgactcctgcaccgccatcttgggccggccctcgtgccgaattct

SEQ ID NO: 71 - DNA, 436 bp, rat
ccatataataatttaatatatgccagccaaacaaagtagtttatctttattcaattaaataaaaacagacctgtcaggtatattatataacattcactatatacacatgatttaggcgatgcaaggtaattctaggtatgctaactgttcaactattagtgaaacacagaaggtgtcaggagcccagcgtgttcctgctcacattgggtgcctgcgtttctgtggacagttagagggacagccacaagccaggacagatattaccagtaaacgtctgagggacagaggggctggggatgagtctagcagagattaacagtctcctaagtgtggatagcatacttgacagttacgctttaacaagttcctcttcgatcatgttcatgacgtcaaagtttttgtttgaaggcaacaccaccacattttacctcgtgcc

SEQ ID NO: 72 - DNA, 465 bp, rat
  misc_feature (462)..(462): n is a, c, g, or t
gagtggcagtgatttattgcatactcacatatacatacaggctgacggccaccctgccttcctagccaccatgtgagtacaaacacagttcttctggaggttttatctctatgcccttccccctacagtgggacttcttggaagtctgaaaagtggaaggtcacagagacccatgtagttgggagagagaagacaacaactatgtatgtcttgactgaggcaaaagagtcttgaggccagtggtaatcgagtcctgaacccaaggtcctccagaaaggttttcaccaactatctgatatgacatcaactttacccttgggtgtgggcagtttttccttctccttgactctcttctagatggctggcacagacagtcaggtggggctgtggttctgcactcctgacccacaagaagctagggagtaagataaccatccagccatagctcctgggtcatggtangaa

SEQ ID NO: 73 - DNA, 695 bp, rat
ttttttttttttttacatggtatattatttttattgaatacatatagtcattcatatcattacatattatatatatatatattttcccgcagtagtatccttctgttaaagcaatagagatgtaagtgctcgattaagtatttcagttaaagaaccagtatgaaaaattgactttaactaagcgagtgcatgataagttaattccagggataacactagactactgaccctatttggctttctagaaacttttcctgatgagattgttcttttattaatgaatgaaatataaaatatgtcttaatgttaattgctaacatagaaacaacaatgaaatgtataaaacaagagcagtctgattattaaaatattgttgtgtagtctattaaaatcgcctaattgagattacaaatatatgcatataatatatatatatatatatattttacctaaaggatataaagtaataaactttcagtatttctaggtttcaatttgtgctcatactattagcaaagacattcaaactaatgttataatgttttatatgaaatgcttaaaacttcgaggcataatacaatattgttacagcaaattatattatgggacactgggattagtcgcttctgtgcaatgggaaattgtttctataaagtttacgggaccaagtgtagaaaagaactgcaacttgtcaa

SEQ ID NO: 74 - DNA, 597 bp, rat
catagtcaacaatgtgttttactatacatctcagatttatacatttcatatatgcttttaaagcttcaattaacagatcaatacaaaataaaatatatatatatttatatatgtgcagcagtggttctcaggcacaggatttaggaggaggatggagggagtctttccttggcatgtcaaccatgatagtggaacgtgtccttctgacttagctgccttgattgaactttacatggcaaacagttgaacatgtatgccattgctcattggaaggataagatttgaagtaagttcatagcctgcatgttttgaagtctttaagacttaaatgcttgctttcctcctacgagctccaagatcatcctatgaaaaaaatatgtccacaaactgtctggaacacctgcctaagaaccactgcctatggttattcaatgtcctcaggcctcacaggatgaggtaatgggatgatggatttcttctcagtgtccctggaaagtgctttcctcatatcgtaggcatcctcatcaggctccccattgctggctgagtagtactctatgactgtcctgtagacactataacccaactgcttgtaca

SEQ ID NO: 75 - DNA, 282 bp, rat
gacacttgttacagaaggtaaaattctcacttttgagtcatagattattgaaacctgacttagattttattgcaaaagaatgtatgataaacagttcaagctatagtataaaaggctttattttgaaactcaagcatctcctcattgagagtctgcaaaagggcttcctcagcgttacagtcgttacaaccttgaaaaactagtgagacttagaagacgtaacaaataacatgaaaagatttgcttctcttgtattaaaaatgtttctcatgtataatacaa

SEQ ID NO: 76 - DNA, 622 bp, rat
gccaaaatgaggctttatttcgggagacagtaaggatggaggaagtaaaagtgcgcaggtgtgaattccaaaccagcaacggtctcttcaggccaaaaggtgaattcttcggtaacccagatctgatgttagttccctggagagatcttttcccataagccatctttattttttctgtagaggagagctttatttccaggaaacagtatattctctggagatgggaatttttttaaaaacatcaaggtagatctaatatggtcaacaaagtgggggggctcagccagaggagaagtagaaaggtttgggcctcctgctaaagctctcgcagcacgcagttgctcctctgggccacgatcttgaaaggaagctctgtaaatctctgcagttttaatgttgactgcgatgccataaatgattggaaagtgattttcattttcttcccggtcatttaattctgttacacataatgtcactaagtgaatgtcatcatcctgtttgtcaaattcactaagaagctgatgcgtaagtttctgtgacaactgcctatcatcactgaatcctcccacaaggtggacttccagccttccgcactcggcatgttcagagaaggattttaggg

SEQ ID NO: 77 - DNA, 2208 bp, rat; identical to SEQ ID NO: 69

SEQ ID NO: 78 - DNA, 511 bp, rat
gagaaacttaagtcttgggtacatcaaaaccaatttctgggagaggggaaaaaaaaacagaactcataatagaaaaaaaagttaccatcatctgggccacaacagaacccagagaatatattcttataattgaaaaattctaggtgcttcataattgaccttttgatacaaaatgacctgttgaatttgtaacttggttcttgaaagaggtccacagacaaactaggaagtcttcagacctcagctgaatgccgtgaggggttatttggcttttgactcttctggtttaagaggtagcagcagcaacagtgcccaccttctgggcagcttctttcttggcatgatgagcctgcaggactgccacagcttcatccaccttggaacggagggactcgggggactccagcatgtggagcagctcagagttgtcgatttctagcagcatccctgtaatttttccagccaggtttgaatgcattgtttggataagtgggaacaaacgctcccccag

SEQ ID NO: 79 - DNA, 1758 bp, rat
gaatagcgtctcgggagtgtccctgggtaatcgctgcatctcgttttgtgtgtgtgctctgtcgaaacgtctgtgatgtgtgtatggttttcacgtgaacggaggcaggcagagttgggtctgtgggttctagtgtgttcttaatctttttggaagtttgtgcagtgacttcccctctgggattgtttcctatgcataccttcaagtatgtgtgaatgtgttttctgtggtcccttgatcttactgggcttctctaaggagggtggctggaccatctgctacgtgtctgggagcccctctctagctaccacatgtcccgacatgtgcttactcccaatatttgcacccactcgcattcacaactcccaggcaaaaagaaaaaatcaaaaaaacaaaaaaaacgtgcactggggcacctagaaaatgggcagccaaggctccgcctacattttgcttcctccttggaatttccagccctgtgcagccaactgctccctagctgcgaagggcggagtttcccggctctataagtagtggtgccttaccggggatccgcactcctccgtaccctctgtacagcgcgcgaattatgtgccattcgcgtaaccacctccacaccatgactggcctgagggctccggcgccagttccctccaccggcccggaactccggcggggctccggtcccggaattttcaccttcgaccccctcccggagcgggcggtagcgtccgccgtgcgtccgaacacttctcgcgggcacggaaaacgcagccgacgggtgctctaccctcgagtggtgagtatcgcccgagtgggcagcaagaggtcgagtcgccccggaacctttgggaacaactagatgcggggactttcgtctgacgtttccctcttttctctgctcaggtccggcgccagctaccaaccgaggaacccaacattgccaagaggatcctctttctcctgctcgccatcatcttctgccagattttgatggctgaagaaggtgtgtcgcaggccctggctccggaggatgctaccagcgccatatcacctgagcccatctctgcgcccattactgcgcctcctgtcctcgagcctttgaacctgacctcggagtcctcggactatgctctggatctcaaagcttttctccagcaacacccggcggcattctaaacgcgatgggtcacagtccggaaaaaaaaacccaaagagcaccaggggtacctggtcggcaagaacgtatcccaaactgggacttataaggcaacgctaactcagaacactaccgccaagatgccggttcttggggcgagcccgaggcaccgtgggtcctggctaggctcactggtgacggacggaggtcttctccgtgtctaattaatatttatgtatttatgtatatcctcctaggtgaaggaggggtgtatgtaatatttattctaacttatgcaggggtgcgagatatgcccccttgctgtgacacagatatttattacgatttatagggtccgtgagacagagttgtgggaggattagtttagtcttggtcggggggcataggtttaggggtaacactccattttccagcacttcgactctgttgtaagactttggcagacccttgggaatacggtctgtgtgcctttgatgtcttcctgactggaagtcttgggtccatggattgtcagagggcggctgtctggggtcgcctagtatgttctgtgaacacgaataaacttgatttgcctgtcg

SEQ ID NO: 80 - DNA, 822 bp, rat
aacaaacgccatgtcacagaccaaaacagcgaaggttcgcgtgaccctcttcttcatcctggcgggtggagtgctcgccatggtggccgtggtgaccgaccactgggccgtgctgagtccacacctggagcaccacaatgagacgtgcgtggcagcccacttcggcctttggaggatctgcaccacttgggttgccatgcacaaccaagacaagaactgtgacggcaccataccagcgggggaaaagaattgctcctacttcaggcacttcaacccaggagagagctcggaaatctttgaattcaccactcagaaggagtacagcatctcggcagcggccatcgctatcttcagccttggcttcatcatcataggctccatctgtgcctttctgtccttcgggaataagcgtgattacctgctaaggccggcatccatgttttatgcctttgcagggctctgcctcatcgtgtcggtggaggtcatgaggcagtcggtgaagcgtatgattgacagcgaggacacggtctggattgagtactattattcgtggtctttcgcctgcgcgtgtgccggcttcactttgctcttcctcggtgggctgtttctcctgctgttctccctgcctcggatgccccagaacccctgggaatcctgcatggacactgagtcagagcactagatcaaagcagagtctttcggaggtgaggagggagtctcacatctgccctgacttcttgtctatcgtgtgtctctccctctgagctcctctacaaacagtgcacatggacacaacccagacctgcccaggtcagaggaagc

SEQ ID NO: 81 - DNA, 5721 bp, rat
atgttcagctttgtggacctccggctcctgctcctcttaggggccactgccctcctgacgcatggccaagaagacatccctgaagtcagctgcatacacaatggcctaagggtccctaatggtgagacgtggaaacctgatgtatgcttgatctgtatctgccacaatggcacggctgtgtgcgatggcgtgctatgcaaagaagacttggactgtcccaacccccaaaaacgggagggcgagtgctgtcctttctgcccagaagaatatgtatcaccagacgcagaagtcataggagtcgagggacccaagggagaccctggcccccaaggcccaaggggacctgttggcccccctggacaagatggcatccctggacagcctggacttcctggtcctcctggtccccccggcccccccggaccccttggtcttggaggaaactttgcttcccagatgtcctatggctatgatgagaaatcagctggagtttccgtgcctggccccatgggtccttctggtcctcgtggtctccctggcccccctggtgcacctggtcctcaaggtttccaaggcccccctggtgaacctggcgagcctggcggttcaggtccaatgggtcccccaggtccccctggccctcctggcaagaacggagatgatggggaagctggtaagcctggccgccctggtgagcgtggacctcctggacctcagggtgctcgtggattgcctggaacagctggcctccccggaatgaagggacacagaggtttcagtggtttggatggtgccaaaggagatactggtcctgctggtcctaagggagagcctggcagtcctggtgaaaatggaactcccggccagatgggtccccgaggtctgcctggtgagagaggtcgccctggaccccctggcactgctggtgctcgtggtaacgatggtgctgtcggtgcagctgggccccccggtcccaccggccctactggccctcctggcttccctggtgcagctggtgctaagggtgaagctggtccccagggagcccgaggctctgaaggtccccagggtgtgcgtggtgagcccggaccccctggccctgctggtgctgctggtcctgctggaaaccctggtgctgatggacaacctggtgctaaaggtgccaatggtgctcctggtattgctggtgctcctggcttccctggtgcccgaggcccctctggacctcagggccccagcggcgctcctggtcccaagggaaccagtggtgaacctggtgcccctggcaacaaaggagacactggtgccaaaggagaacccggccctgctggagttcaaggtccccctggccctgctggagaagaaggaaaacgaggagcccgtggtgagcctggacctagcggcctgcccggacctcctggcgagcgcggtggacctggtagccgtggtttccctggtgctgatggtgttgctggccccaagggtccttctggtgaacgtggttctcctggccctgctggtcccaaaggttctcctggtgaagctggtcgccctggtgaagctggtctccctggtgccaagggtctcactggcagtcctggcagccctggtcctgatggcaaaaccggcccccctggtcccgctggtcaagatggtcgccctggacccgcaggtcctcctggagcccgtggacaggctggtgtgatgggattccctggacctaagggtactgctggagaacctggaaaggctggagagcgaggtgtccccggaccccctggcgctgttggtcccgctggcaaagatggcgaagctggagctcaaggagcccccggccctgctggtcctgctggtgagagaggtgaacaaggtcccgctggctcccctggattccagggtcttcctggtcccgctggtcctcctggtgaagcaggcaagcctggtgaacagggtgttcctggagaccttggtgcccctggaccctctggcgcaagaggcgagagaggtttccctggtgaacgtggtgtacaaggtcccccaggtcctgctggtccccgaggaaacaatggtgcccccggcaacgatggtgccaagggtgatactggtgcccccggagctcctggtagccagggtgcccccggtcttcagggaatgcctggtgaacgtggtgcagctggtcttccaggtcctaagggtgacagaggtgatgctggtcccaaaggtgctgatggttctcctggcaaagatggcgtccgtggtctgactggtcccattggtcctcctggccctgctggtgcccctggtgacaagggtgaagctggtcccagtggtcctgctggccccaccggagcccgtggtgcccccggagaccgtggtgaggctggtccccctggtcctgctggcttcgctggcccccctggtgctgatggccaacctggtgcgaaaggtgaacctggtgatactggtgtgaaaggtgacgctggtcctcctggccctgctggtcccgctggaccccctggccccattggtaacgttggtgctcctggacccaaaggttctcgtggtgctgctggtccccctggtgctactggtttccctggtgctgctggtcgtgttggtccccctggtccctctggaaatgctggaccccctggccctcccggtcccgttggcaaagaagggggcaaaggtccccgtggtgagactggtcccgctggacgtcctggtgaagttggtcccccaggtccccctggccctgctggtgagaaaggatctcctggtgctgatggacctgctggctctcctggtacccctggacctcagggtattgctggacagcgtggtgtggtcggtcttcccggtcagagaggaaaaagaggcttccctggtcttcctggaccctctggtgaacccggcaaacaaggtccttctggagcaagtggtgaacgtggtccccctggccctatgggcccccctggattggctggcccccctggtgaatctggtcgtgagggatcccctggtgctgaaggctcccctggaagagatggtgctcctggtgccaagggtgaccgtggtgagactggccctgctggcccccctggtgctcctggtgctcctggtgctcccggccctgttggtcctgctggcaagaatggcgaccgtggtgagactggtcctgctggtcctgctggtcccattggccctgctggtgcccgtggtcctgctggaccccaaggcccccgtggtgacaagggtgagacaggcgaacaaggtgacagaggcataaagggtcatcgtggcttctctggtctccagggtcctcctggctctcctggctctcctggtgaacaaggcccctctggagcttctggtcctgcaggtccccggggtccccctggctctgctggttctcctggcaaagatggactcaacggtctccctggccccattggtccccctggtcctcgaggtcgcactggcgatagtggtcctgctggtccccccggacctcctggaccccctggccctcccggtcctcccagcggtggttatgacttcagcttcctgcctcagccacctcaagagaagtctcaagatggtggccgttactaccgggccgatgatgccaacgtggtccgtgaccgtgaccttgaggtggacactaccctcaagagcctgagccagcagattgagaacatccgcagccctgagggcagccgcaagaaccccgcccgcacatgccgtgacctcaagatgtgccactctgactggaagagcggagagtactggatcgaccctaaccaaggctgcaacctggatgccatcaaggtctactgcaacatggagacaggtcagacctgtgtgttccccactcagccctctgtgcctcagaagaactggtacatcagcccaaaccccaaggagaaaaagcatgtctggtttggagagagcatgaccgatggattccagttcgagtatggaagcgaaggttccgatcctgccgatgtcgctatccagctgaccttcctgcgcctgatgtccaccgaggcctcccagaacatcacctatcactgcaagaacagcgtagcctacatggaccaacagactggcaacctcaagaagtccctgctcctccagggctccaacgagatcgagctcaggggcgaaggcaacagtcgattcacctacagcacgcttgtggatggctgcacgagtcacaccggaacttggggcaagacagtcatcgaatacaaaaccaccaagacctcccgcctgcccatcatcgatgtggctcccttggacattggtgccccagaccaggaattcggaatggacattggccctgcctgcttcgtgtaaactccctccatcccaatctggttccctcccacccagcccactttcccccaaccctggaaacagaccaacaacccaaactcaatttccccaaaagccaaaaattgggagacaatttcacatggactttggaaaacatttttttcctttgcattcatctctcaaacttagtttttatctttgaccaactgaacgtgaccaaaaaccaaaagtgcattcaaccttaccaaaaagaaaaaaaaataagaataaataaataactttttaaaaaaggaagcttggtcctcttgcttgaagacctatgtgggtataagtccctttctgcccactgggcttatgataccccaaatgctgccttttctgttcctttctccaccccctcttggggcctctcctccattgctccccaaatttaagtctcccccaaagacacaggaaataatgcattgtctgcccagccagcaaaggcaatgctgaatcgtcccaccagcccctcaacccccagcttacttccctacccagcaccttcaaatcctgccgggacattgggttctcggactattgaaggagcctaaccatctggcatctccatggcctctgcaacaaatccccacacacactttgtttttgagggcctgtgctgggggagccacctgcccctcgcaggggtttggagccaggcagggtcacagcagactggaaacatcggccacacatgtgcaggctgggtgggagagactgttctgttccttgtgtaattgtgttgctgaaagactacctcgttcttgtctttgtgtgtcaccggggcaactgtgtgggggcggggatgggggcagggtggcatcgcgcccagtttggtatcaaaggtgctacatctctgtgaaggggtggggtgggaaggaatttctggtgctatagaatctgagatgctcccctacaccagcaaatgttccttttgttcaaagtatttttttattctttttttttttttaatggatagggacttgtgtgaattttcttttcctgacggtgctatttaacaagggaggagagagtgccaactccagcctgctctctctctacccccctcttcactcttccagctcctgggcctatctgatgatctctctctcttctgaaaccctcccctcttgctgctgctccctaccctcagcttctctctctctctgtcctgcatcagggtttcagagcaccattttccaaagcacaaagcagtttttatccctggggtgggaggaagcaagagactctgtacctattttgtatgtgtataataatttgagatgtttttaattattttgattgctggcataaagcagggggaaatgatccagtccacag

SEQ ID NO: 82 - DNA, 426 bp, rat
gagtattattgatttattagaaaaactagtaaatgggattcctctggttggtggaagcacatttgagcgggtggaggacaaggcccagccagccccagatggcatgatctctgcccaacggggtttcatttctctaccttcatttcaccttgtgccctccctgagcttgcttgtccaagggaccaagctgtgcagcctgctggtatcttgttgatggaggaaggagatccagaaccagcttaggggacctgttgccctccagtaggcaggaaggagaagatggggaagggaagggagccgagcctacacagacttctgttagtaccagtagaggtggggtgggagggtcccaggaaccgctgcacctcttcagcctgcctgcccaggcccaggacaaaggcaatggggagggaaggagatctgcct

SEQ ID NO: 83 - DNA, 580 bp, rat
tttattttactacctgcatacaaaaacatattgcacatcaaacaaccaaaatcaaaaaagggggggaaaaaaggaaaaaaaagggtacaaagaaaatgtgaaagatactctactgaagactaaacatgtagtttatacacaataaaccttctggaaattgatcttttcagtagttcaggctatgtctgaatggacatgactaatcagcttagtgtttcaactaaagctatgtatgatttttaaatactgtacactttaataaataaaccaaacaaagcctcaatgtagaacagtcactgccaatatcacccagtatccctgcagatgagttaacatgtatttccagtggtctgcagaattgcctctacaaacagcatttaaaaaacacattaaacagaccagtttccagactaaactaatgaaattacaattcaatgcaaaatattttagactgcttcattctagatttcctcaggtgaaaaactggatgcatattattaaaaatgtaacacaagcagctaatgctttcataaagcctcgtgccgaattcttggcctccagggccaaattccctatagtg

SEQ ID NO: 84 - DNA, 524 bp, rat
aggagctggggaccgaacccagggccttgcgcttgctaggcaagtgctctaccactgagctaaattcccaaacccctcttttgattttcttatagataatcatggtttccccttttctagtttctgcctttaagatatctcagccctttaatgttttgctggcccttagcgctctcacaatctctagccttgcaggagtgatatcaggtgtacagagagtagaatttcactacaagtgggaaatcactaatggggaaattcatggggagcccataccaaggtctggagtgcaaaaccctgtctcagaatctttattctagggtcatttcagccctggactgcaacctcgtgtgattgagtaaggtcgatgactcctgtccccactgtttcctttggcacatctttgtgttttctcacatcaacctctctcctcaaaccgtttccaaactagtcacgggttgctggcctacttactgaatgcaaaacctcagaacaaagaggaccgaaagaagccggactaggca

SEQ ID NO: 85 - DNA, 2131 bp, rat
gtgtcgcgctcgcctgagtcaccgccatggccgagagcgcagagagcggcggcccaccgggcgctcaggacagtgcggccgacagcggccccgcagagcccaagatcatgaaggtcacggtgaagacgcctaaagagaaggaagagttcgctgtgcccgagaacagctcggtccagcagttcaaagaggaaatctcaaaacgtttcaaatctcatattgaccaacttgtgttgatatttgctggaaaaattttaaaagatcaagatactttgagtcagcatgggattcatgatggacttacggttcaccttgtcatcaaaacccaaaacaggccgcaagataattcagctcagcaaacaaataccactggaaacagtgtgaccagttcaccagctcctgacagtaaccccacgtctgggcctgctgctaacagctcctttggtttaggtggacttggaggacttgcaggtcttagtagcttgggtttaaataccaccaacttctctgaactacagagccaaatgcagcggcaacttttgtctaaccctgaaatgatggtccagatcatggaaaacccctttgtgcagagcatgctctcaaaccctgacctgatgcggcagctgatcatggccaacccacagatgcagcagctgatacagagaaacccagagatcagtcacatgctcaataacccaaacataatgcgacagacattggaacttgccagaaacccagcgatgatgcaggaaatgatgagaaaccaggaacgagacttgagcaacctagaaagtatccctgggggctacaacgccttacggcgcatgtacacagatattcaggagcccatgctaaacgctgcgcaagagcagtttggtggtaatccatttgcttccttagtgagcagtccgtcctcagcagaagggactcagccttctcgaacagaaaatagggatccgctacctaacccttgggctccacagactccccagagctctccagcctctggcagcactggcagcaccactaacacagtgagcacctctgctggcaatgccaccagtaccccggcgggacagggcacctcagggcccaacttggtgcctggagcaggagctagtatgttcaacacgccagggatgcaaagcttgttgcagcaaataactgagaaccctcagctcatgcagaacatgctgtctgccccctacatgagaagcatgatgcagtcactgagccagaaccccgaccttgccgcacagatgatgctgaataaccccctatttgctgggaaccctcagcttcaagagcaaatgagacaacagctcccaaccttcctccaacaaatgcagaaccccgacacactgtcagccatgtcgaaccctagagccatgcaggcgctgctgcaaatccagcagggcttgcagacgttggccacagaagctcccggcctcatcccagggtttactcctggcttggcagcgggcaattctggaggccctgcaggaaccactgcacctagcactgcacctggtgaggatacgaacccccaagggggcgctgctgagccaggccaccagcagtttatccagcaaatgctgcaggccctcgccggggtgaaccctcagctgcagagtccagaagtcagatttcaacagcaactggaacagctcagtgcaatgggattcttgaaccgtgaagcaaacttacaagcactgatagcaacagggggcgacatcaatgcggccattgaaaggttgctgggttcccagccgtcatagcagcatttctgtatcctgaaaaaatgtaatttatttttgataacggctcttaaatctttaaaataacctgctttatttcattgggattctgtgctgttgtaaaggaaaccaataggaagtctctggaggtggagtgcagtaagatgtgcgggtttctgtgtctttggaacagtgggaatcgatgtctctggttaaggccgctgcatgcgtcaaacacttggcatttgttgtaatcttttaaacatcaccttttctaattgggtgaacacatttttgtcctgcatctgtccaactaacttgctttttaaacatagccctctggtagtaatttatgtagaataaaggcattaaaaagc

SEQ ID NO: 86 - DNA, 696 bp, rat
actaaagtacttagtttaatgaatttgtttttaacacaaatgaaaaacaagattcttaccattttaacgacaactacaacttcagaccaataacatacgaattttgcaaagtttttaactacagattatcaaatataatagagaatgcaatttagtgctttttgtcacaatatcaaaaataagcaattttctcaaagttatcaaaagtgccccactcaaaatctttttcttaatcaagtaaaactacctgctattgtgcatgtgtgttaaaaattaaaacggaaaccatcagtgctattacacagagaaaccctgtcttgaaaaacaaaacaaaacaaaaaaaaaaaaggaaaaaggggaaaaaaggaaaactttatatattggatgtcatttaagtgcttaaccaagcaaacatgcctaacacagacagctcacattcttggtatgaaagtcacaccacagaatatgaatgttataacacgacttgtatgtaccaaataaagcaaataaaacctatcatttagtatgtctgcttgtttgcttttggtcaactagtcggcagacttaacgttgtactgcttcactccagtagtctacctcgtgaggttaggttctgtggttcacgtcaattgtgggacgacagtcctcatgagagctgagcgtttttgcaggaaaacagctttcatttccaataca

SEQ ID NO: 87 - DNA, 523 bp, rat
  misc_feature (457)..(457): n is a, c, g, or t
tttttttttttttttttcccttttaacaacagtctttattgataacttcccaacatctgtaaacatcaggtataaaaatattccattcagctgttttctaaggtgactggccagctcctggagataacctgatggaccttggagaaacacagctcctcacagtcaaggctgcctcttcctccagaattcaacacaacaggaaaaaagtactccacagagggaaaggagacatagttgaatcagcagctgccagtgggtaggaacaagctcatccctcctgtgcccacccagggtgtgggggatgacaatctggctttggtctctggagaccttagaagcactgttcaaagctggcccaggctgatttcaaggttacctctacccatccccactgccccagctagacatacatgctggcatacgaagtcctgctcttacggggagtggcaggaattangaaccctgcctacaaaagaaaggagcagcaaagctgactgactgttaccctacgagaaccactgct

SEQ ID NO: 88 - DNA, 474 bp, rat
gaaaaatttattttatactcttagaagctaagaactccaccacacatgaaccaaatttagaatccagagtctttcctagtttttctacttccttctgaaattttataaacaagattttgtacacaagaggtagcagaggaaaattccagtctgcttgttccaagctcaaagatgctgtacacgccttggtgctagcagggagggtggggcaagccaggtgaatctggaggctcaggctgtgggtctcacagctaacagctgttggtgaccagagagaggccacctggggagctacaggcaagctgcctgtaggaggctcatctgtctgtcccagggatgccttaggggcaagacagaagtcctgaggtcagcctggactgaaggagctttttgagaacacacagcattgagtcaattgtgcaattcctgcttgattgcagaccactgtaaaagattataaaaacattttcatcc

SEQ ID NO: 89 - DNA, 446 bp, rat
aaaaattatatttaatacaagtgaatagatgagaagatccgaaacattataaagcgagatacacaacacataaatagtttgcacaggagagccacgcctccattgcataccactgtctggtacgggaatacttaaatccagtgacaatggagagtccataaaaatgctaacctgttgtcccttgtatgaagttcttcaagtataaaagtccaatacagtgtaaaatagtattcaatttagtttaagagtaaaaattgcaagtatcacactttcagaaggaaaaaatataaagccgtcttttaaaactacatacactacacaaggaaagtgggaacatctgttcccggcagatgagatctgcagggggaaaacattcgaggaagcacagaaccggcgacgtagcttgtttaaaaaaaaaataaaagaaagaaagaaagaaagaaaag

SEQ ID NO: 90 - DNA, 667 bp, rat
gcccgacttaatcggctcaagaagaaggagtatgtgatggggctggagagtcgagtccggggactggcagccgagaaccaggagctgcgggccgagaatcgggagctgagcaaacgggtgcaagcactgcaggaggagagtcgctacctacgggctgtcctaaccaacgagaccggactggctcgcctgctgagccggctgaccggcgtgggactgcggctgaccacttcactcttcagagactcgcccgccggtgaccatgactacgccctgccggttgggaagcagcctcaggagctgctggaagaggacgacgcggagggaggagtgtgtctccatgtggacaacgataaggtgtccgtggagttctgctcggcgtgcgctcggaaggcgtcgtcttctcttaaaatgtagggtcaagtaatctgctctttatccgcgtttacccctttctacacccttacaccatgtgaaacaccttagtgggagatcttcaccggacgcatttgagaggcggaaaaaaagtaatattaagtcttttaagtgtttagctaaaagcatgaatgtgacactgtaaccaactcctaatgataacctgtgactattaaatctctctgacagtttcttttttaggtgatttccttcctgccaggctccgttgtacggg

SEQ ID NO: 91 - DNA, 346 bp, rat
tttttttttttttttttgagggtatgggacttgatttattgttctcatcagggcaatggccagggatttccccccaccctacagccgtgtccaccacaaaggtggccctgaaaagctgcaaagctggtgagtcaatgcatgtcttgggagtagcactaaagaagaccctcaatggggctatgtctcagggcaaacacccaagtccacatcttgtttctaaagccccgcagggcctgaaaggtggagtccaaagtcagagtcttgggactgctcctggcgggggctcttctgaagtgacatcggcatatgccaactctgcaggtacttcctccatcctcccggcaaa

SEQ ID NO: 92 - DNA, 552 bp, rat
tttttttttttttttctaaatgggatttcttgaaatggctgttgaatctctttattgaagaaaaaataggtgacatacatgctttatgcagaagtgacattgggggtactgacacaccagctgttcaacagtcctatactgctgacaatcaatattgttatgggtcagttaaaatcatgaagggggacaccaagtaactatcctttaactgtttccttcctctccagcacccagtcttttcacattgttctcaggaactctgtaacttagccatcaagtaaagcacattggttgttcctagggccccggcttgcaggacttatgctccaacacagcttcttactctgggcatatttctaagaaacatcaaattcaaggctgaaaatgaactatgtgaatttagaatatgggcaagttagcatacgaacttacagattccaagatatgtggtgaaatggagagatctgaaaggggccctgcttttgataaaatgaaaagaaaaaagaaaacaacataacataacaaatagttggaaagaaaccaatcagtata

SEQ ID NO: 93 - DNA, 1039 bp, rat
gaaacatggcctctggtgtggctgtctctgatggagtcatcaaggtgttcaatgacatgaaagttcgcaagtcttcaacgccagaagaagtgaagaaacgcaagaaggcagtgctcttttgcctgagtgaggacaagaagaacatcatcctggaggagggcaaggagattctggtaggagatgtggggcagactgtggacgacccctacaccacttttgtcaagatgctgccagacaaggactgccgctatgctctctatgacgcaacctatgagaccaaggagagcaagaaggaggacctggtattcattttctgggcccccgagagtgcaccccttaagagcaaaatgatctatgccagctccaaggatgccatcaagaagaaactgacaggaatcaagcacgaattacaagctaactgctacgaggaggtcaaggaccgctgcaccctggcagagaaactaggtggcagcgccgtcatttccctggagggcaagcctttgtgagccacctccagccccctgcctggagcatctagcagccccagacctgctcttgggtgttgcaggctgcccttttcctgccagaccggaggggctgggggggttccagcagggggagggttttcccttcaccccagttgccaaacatccctcccaccccctggaccgtccttttccctccatccctgacggttctggccttcccaaactgcttttgatcttctgattcctcttgggttgaagcagaccaagtcccgtcctaggcacccagtttggggggagcctgtatttttttttttaacgacacccctactcctgatctgtcccatcccatgctgccaacttctaaccacaatagtgactctgtgcttgtctgtttagttctgtgtgtaaatgaactgtggaaatgaccctccctgcaccagctggttgccctcccctttccctttgatcttggccactcatggaagcaggaccagtaagggaccttcaatttaaaaaaaaaaaaaaacacaataaaaaggctaattaacaaa

SEQ ID NO: 94 - DNA, 2439 bp, rat
  misc_feature (1865)..(1878): n is a, c, g, or t
tgaagagattgtccctggtccaaagtcaaggtacagaattaaagtggaaggcaaaaagcacactttgatcatagaaggagcgacaaaggctgacagtgcggagtactcggtcatgacaaccggaggacagtcatcggctaaactaagtgttgacttgagacctctaaagatcacaacgcctctgactgatcagactgtaaaacttgggaaagaagtatgcctgaagtgtgaaatctctgaaaatgtaccaggaaaatggacaaaaaatggactccctgttcaggagggggaacgtctgaaggtcgttcacaagggaaggatccacaagttagtcatagccaatgctctcattgaagacgaaggtgaatatgtgtttacaccagatgccatcactgttcctttggtctgccaaattcacgtcatcgaccctcccaagatcatccttgacggcctggaggctgataacaccgtgacagtgattgccggaagcaagcttcgtctggagattcccgtcacaggggaaccacctcccaaagccatctggagcagagcagataaggctatcatggagggcagtggtcggataagggcagaatcctaccccgacagcagcacgctggtcattgacgtggcagagagagatgactctggtgtgtacaacataaatctgaaaaatgaagctggagaagcacacgcaagcatcaagttaaggttgtggatatccctgatcctccggttggcaccaaatgtgacagaagtgggagatgactggtgcatcatgaactgggagcctcctgtctatgatggagggtctccaattttaggatactttattgagaggaaaaagaagcaaagctccaggtggatgagactgaattttgatctctgcaaagagacaacttttgagcccaagaagatgattgaaggggtggcctacgaggtccgcatatttgcggtcaatgccattggcatctccaagcccagtatgccctccaagccctttgttcctttggctgtgaccagccctccaactcttctggctgtcgactccgtgaccgactcctctgtgacaatgaagtggaggcccccagaccagattggtgctgcaggtttgagtggctatgtgctagagtattgctttgaaggaagtacatcagcaaaacagtctaatgaaaatggggaggctgcgaatgatctaccagctgaggactggtcactgcaaacacagaccggatcgacaagacccaagttcaccatcactggtctgcccacggatgcaaagatctttgtacgcgtgaaggctattaacgcggctggggccagtgagaccaagtactattctcagcccatccttgtgaaggaaatcattgagccaccaaagattcgcatcccaaggcacctgaagcaaacttacatccgtagagttggagaagctgtaaatctggtgattcctttccagggcaaaccaagaccagaactgacctggaagaaggacggtgcagaaatcgacaagaatcaaataaacattcgcaactcagagactgataccatcatattcattaggaaagcagagcgcagccactcaggcaaatacgacctggaggtcaaggtggataagtacgtggaaaacgcctcgatcgacatccagatcgttgaccgcccaggcccaccccaggctgtgactattgaagatgtgtggggagagaatgttgctctaacatggacaccaccaaaggatgatgggaatgctgccatcacagggtacaccatccagaaggccgacaagaaaagcatggaatggttcgccgtcattgagcattaccaccgaaccaatgccaccattaccgagctggtcataggaaacnnnnnnnnnnnnnnagaaaatcccaaagcccgaaatcacctggatgaaaaacaaagtccccattgtggatgacccaagatacagaatgttcagcaaccaaggagtctgtaccctggagatccgtaagcctagtccctatgacggaggcacgtactgcgcaaagcagtcaatgacctcgggacagtggagatcgaatgcaaactggaggtgaaactggaggtgaaagttgtagcacagtaaggatgtttgaatgtatattgtcacccaaggtgggctgtaccttctacgaggctcctcctagcacaggcgtgcctccaaacataatcgattcatatttgcgagacttacagtcaagcaatccggaggaatactgagggctgggcacggcctctacacaccagtgccttgacattcgattgaaaacggaaagcattttctggttttctcccaggccctcaaatgtggtcattttctctcctcctaaccttgaagaaagaaagaaaaataaattgtttgcacagatggcttgattaaaaaacgcaaacagataaaaaaaaaaaaaaaaaaaaaaaaaa

SEQ ID NO: 95 - DNA, 532 bp, rat
caggaatctttattacagtgtaaatccaagctcaaggctcgcctgggccccatgcaaagccccagcacaggggttggtggcctcagagacaccaacccctcacggcgcctccagcggcgggtcacggaagtgcagagcagcgtcctcactattcaactacaagtcccagcaggctccgcggccaaggagcatggtcttttcctggactcttagagcagagcctcttaggaaatgtagtctgggtcgctcaggcacttcccactgggaaatggctcggccgaatgggagagggtgtggatgcacgggaaatgaaagggaagagggctgctggggtgtggcaggcgtccctcgggcaaagacacccttctcattcggctttggctttggatccggagactgatgctgctggggcaagggttccggtccccgggatcttagctcggatcttagctttgatgtggctcaactggctggtcaccaaccccacatactggtcaatctgagcctgatgttgtctgtacagaagggggac

SEQ ID NO: 96 - DNA, 6035 bp, rat; identical to SEQ ID NO: 20

SEQ ID NO: 97 - DNA, 325 bp, rat
  misc_feature (194)..(194): n is a, c, g, or t
  misc_feature (289)..(289): n is a, c, g, or t
  misc_feature (298)..(298): n is a, c, g, or t
  misc_feature (302)..(302): n is a, c, g, or t
aataattgtagaggaagcaaagcagatcttggtgggtgacattggtgatactgtagaggacccctacacatcttttgtgaagttgctacctctgaatgattgccgatatgctttgtacgatgccacatacgaaacaaaagagtctaagaaagaagacctagtatttatattctgggctcctgaaagtgcaccgntaaaaagcaagatgatttatgctagctctaaagatgccattaaaaaagaaatttacaggtattaaacatgagtggcaagtaaatggcttggacgntattaaggnccgntcgacactgggagagaaactggg

SEQ ID NO: 98 - DNA, 329 bp, rat
gacgggcgggcgtagggggatgcggtccgggaaaggcacggaaggtgcggcggcggcggcttcatcctctttcttgtatcgttgtatcgagtgcaaccgggaggcccgggaactgtaccgggactacaaccacggagtcttcaagataaccatctgcaaatcctgccagaaaccagtagacaaatatattgaatatgatcctgttattatcctgattaatgccattttatgtaaaacacaggcttataggcatattctcttcaacactcaaatgaaatatccatggggaaactctgcatgtttttgtttgctttgtgaagcatacctgc

SEQ ID NO: 99 - DNA, 478 bp, rat
tgcggggatccatgagaccacctacaacagcatcatgaagtgcgacatcgacatcaggaaggacctgtacgccaacaacgtcatgtcagggggcactaccatgtaccccggtatcgctgaccgcatgcagaaggagatcacagctctggctcccagcaccatgaagatcaagatcatcgccccccctgagcgcaagtactcagtgtggatcggcggctccatcctggcctcgctgtccaccttccagcagatgtggatcaccaagcaggagtacgacgaggccggcccctccattgtgcaccgcaaatgcttctaggcgcaccgcgtctgtgtacgcgctctctctcctcaggacgacaatcgaccatcgtgctatggttgcagggtggccccatcctccgccgtggctccatcgccgccactgcagccggcgcctgtttttgacgtgtacatagattcgctcgttttacctcatttt

SEQ ID NO: 100 - DNA, 6849 bp, rat
  misc_feature (2293)..(2293): n is a, c, g, or t
ccctcacagtattaagtacccttaccctaccgctttcctcccaactaatcacatagaagtttaggatatacagttcaagagccttcaaagcccttagaaaacaaacaagtttaacttctgataaggactgtaagactatatcttacatctgttaaatgcaaatcaactgctttaattaagctaaatcctcaactagattggaaggattcaaacctacgaaaatttagttaacaactaaataccctacttactggcttcaatctacttctcccgcctatcagaaaagaggcgggagaagccttagtagaggagattctctacaccttccaatttgcaattcgacatgataatcaccttaaggctttttggtaaaaagggggctcaacccctgtctttagatttacagtctaatgcttactcagccattttacctatgttcgtaaacggttgactcttttcaactaaccctaaagatatcggaaccctctacctattatttggagcctgagcaggaatagtagggacagctttaagtattctaattcgagctgaactaggacagctaggcgcactcctaggagatgaccaaatctataatgtcctcgtcacagcccatgcattcgtaataattttctttatagtaatacctataataattggaggcttcggaaactgacttgtaccactaataattggagcccctgatatagcattcccacgaataaataacataagcttttgactgcttcctccatcatttctactccttttagcatcctccatagtagaagctggagctggaacaggatgaacagtatatccccccttagccggaaacctagcccatgctggggtatccgtagatttaactattttttccctccacctagccggggtgtcttctatcttaggagctatcaactttatcaccactatcattaatataaaaccccctgctataacccaatatcagacacctctctttgtatgatccgtactaattacagccgtcctactacttctctcactgccagtattagcagcaggtatcactatactccttacagaccgaaatctaaatactactttcttcgaccccgctggaggcggaggcccaattctttatcaacacctattctgattcttcggccacccagaagtgtacatcttaattcttctagggtttgaaattatttcacatgtagttacctattactctggaaaaaaagaacccttcggatatataggtatggtatgaaccataatatctattggcttcctaggatttattgtatgagcacatcacatattcactgtaggcctggatgtagacacccgagcctactttacatctgccactataattatcgcaattcctacaggcgtaaaagtattcagctgactcgctacactacatggaggaaatatcaaatgatcccccgccatattatgagccttagggtttatcttcttattcacagtagggggcctaacagggatcgtactatctaactcatcccttgacattgtacttcatgatacatactacgtagtagctcacttccactatgtcttatctataggagcagtattcgccatcatagcttgcttcgtccactgattcccactattctcaggctataccctaaatgacacatgagcaaaagccctctttgccattatatttgtaggtgtaaacataacattttttcctcaacacttcctaggattagcagggatacctcgtcgttactctgattatccagatgcttataccacatgaaatacagtctcctctataggctcattcatctcacttacggccgtccttgtaatgatcttcatgatttgagaagccttcgcatcaaaacgagaagtgctctcaatttcctactcttcaactaacctagaatgactgcatggatgccccccaccttaccacacattcgaagaaccttcctatgtaaaagttaaataagaaaggaaggattcgaaccccctacaactggtttcaagccaatttcataaccattatgtctttctcaatgagatattagtaaaataattacataaccttgtcaaggttaagttatagacttaaatctatatatcttacatggcttacccatttcaacttggcttacaagacgccacatcaccaatcatagaagaacttacaaactttcatgaccacaccctaataattgtattcctcatcagctccctagtactttatattatttcactaatactaacaacaaaactaacacacacaagcacaatagacgcccangaagtagaaacaatttgaacaattctcccagctgtcattcttattctaatcgcccttccctccctacgaattctatacataatagacgagattaataacccagttctaacagtaaaaactataggacaccaatgatactgaagctatgaatatactgactatgaagacctatgctttgactcctacataatcccaaccaatgacctaaaactaggtgaacttcgcttattagaagttgataatcgggtagtcttaccaatagaacttccaattcgtatactaatctcatccgaagacgtcctgcactcatgacccatcccttcactagggttaaaaaccgacgcaatccccggccgcctaaaccaagctacagtcacatcaaaccgactaggtctattctatggccaatgctctgaaatttgcggctcaaatcacagcttcatactcattgtactagaaatagtgcctctaaaatatttcgaaaactgatcagcttctataatttaaactcattgcgaagcttagagcgttaaccttttaagttaaagttagagacaacaaatctccacattgacatgccacaactagacacatccacatgatttattacaatcatctcctcaatagccacactatttaatttatttcaattaaaaatttcttcccaaacctttcctgcacctccctcacccaaaactatagccacagaaaaaacgaataacccttgagaatcaaaatgaacgaaaatctatttccctctttcattacccccacaataataggtctaccaattgttgtgaccattattatgttcccatcaattctattcccatcatcagaacgcctaatcagcaaccgactacactcatttcaacactgactaatcaaacttatcatcaaacaaataatgttaattcacacaccaaaaggacgaacctgagccctaataattgtatccctaattatatttatcggctcaaccaaccttctagggcttcttccccatacatttacccctaccactcagctatctataaacctaagcatagccatccccctatgagcaggagccgtaattctaggcttccgacacaaactaaaaaattctttagcccacttcttaccgcaaggaacccccatctcactaattcccatactaatcatcatcgaaactatcagcctatttattcaaccgatagcactagcagtacgactaacagcaaacattacagcaggccatctattaatgcatctaatcggaggagctaccctagtacttatagacatcagcccaccaaccgctacaattacatttattattctacttctacttacagtacttgaatttgtcgtagccttaattcaagcctatgtattcacccttctagtaagcctgtacctacatgataacacataatgacccaccaaacccatgcataccatatagtaaacccaagcccatgaccactaacaggagccctatcagctcttctactcacatccggcttagtaatatgattccattacaactccacaattctcctatcattaggcctcctgacaaacatcctaactatatatcaatgatgacgagatatcatccgtgaaggaacataccaaggccaccacacccctattgtacaaaaaggcctccgatacggaataatcctgtttattgtctccgaagtattcttctttgccggatttttctgagcattttatcattccagcctagttcctacccacgacctaggcggttgctgacccccaacaggaatcacccctttaaatcccctagaagtaccccttctaaatacatcagtcctcttagcatcaggagtctcaattacatgagcccatcacagcctaatagaaggcaaccgaaaccatataaaccaagccctactaatcaccattctcttaggattatatttcactatcttacaagcctcagagtatttcgaaacatcattttctatctcagacggaatttacggctcaacattcttcatagcaacgggatttcatggccttcacgtaattattggctcaactttcctaattgtctgtctactacgacaactaaaattccacttcacatcaaaacatcatttcggatttgaagccgcagcatgatactgacacttcgtagatgtagtttgactattcctatacgtttctatctattgatgaggatcctactcccttagtataaacaatacaactgacttccaatcagttaattctgaaaaaactcagaagagagtaattaacctacccattatcatcacaattaacatcaccttatcttttatcctcatttcaattgcattctgattgcctcaaataaacttatactccgaaaaagcaaacccatatgaatgtggcttcgacccaacaagttctgcacgccttcctttttcaataaaatttttcttagtagccattacatttctactattcgacctagaaatcgccttactacttcccctcccatgagcgattcaaacaaccaataccgctacaataatagcaactgcctttattttagtcactattttagctcttggcctaagctacgaatgaacacaaaaaggactagaatgaacagaataattggtaattagtttaaataaaattaatgatttcgactcattagattatgataataatcataattaccaacaatgacatctgctttcctaaatttaactatagcctttacattatctctactaggtacttttatatttcgctcccacttaatatctactctcctctgcctagaaggaataatactatcactatttgtcataacttcaacatccacattaaactccaactccataatctccataaccatcccaattaccattctagtttttgcagcctgcgaagtagcagtaggtttagccttactagtaaaaatttcaaatacccacggaacagactacgtacaaaacctcaaccttctacaatgttaaaaatcattttcccatctatcatactcctcccactaacatgactctcagccaacaaaaaaatctgaaccaatgtcacctcctacagctttctagtgagcctattaagcttatcactcctatgacaaaatgacgaaaattacctaaatttctcagttatattctcctccgatccattatccaccccactaatcattctaacaacttgactcctcccactaataatgctcgctagccaaaatcacataaaaaaagaaaatataatgcatcaaaaactttacatctcaatacttattagcctccaaattttactcatcataacattctccgcaacagaactaattttattttatatcctgttcgaagccactctaatcccaacactaattatcattacacgatgaggcaaccaaacagaacgcttaaatgcaggaatttatttcctgttttatacactaattggctccatcccactcttaattgccctcatttcaatccaaaactcaataggaacactcaacttcctaatcctctccctcacaacacaccccctaccctcaacatgatccaacaccattctatgactagcatgtataatagcatttataatcaaaataccattatacggagtccatctatgattaccaaaagcccacgtagaagctccaattgcaggctctataattttagcagcaattctcctaaagctagggggttatgggataatacgagtttccatcattctagaccccctaacaaaatctttagcctacccattcatcatcctctcattatgaggcataattataactagctcggtctgcctacgccaaacagatctaaaatcattaattgcttactcatcagtaagccatatagccctagtcatcacagccattataatccagacaccatgaagcttcatgggagctacaatactaataatcgcccacggcttaacctcatcactcttattctgcctagcaaacaccaactacgaacgaattcacagccgaactataattatagctcgaggattacaaataatcttttcattgatagcaacatgatgattattagcaagcttagccaacctagcactaccacccctaattaacctcataggcgagttattcattgttatagcaacattttcctgatcgaacccctctatcatccttatagcaactaacattgtcactacaggaatatactcaatatatatgattatcacaacccaacgaggaaaactaaccagccacataaacaacctccaaccttcccacacacgagaattaacactcatagctctacacattattcccctcatactattaacaatcaaccctaaactcatcacaggcctaacaatatgtagatatagtttacaaaaaacattagactgtgaatctaacaacaggaaatcaaattccttatttaccaagaaagtatgcaagaactgctaattcatgcacccatacctaaaacatatggctttcttacttttataggatagaagtaatccattggtcttaggaaccaaaaaccttggtgcaactccaaataaaagtaata

SEQ ID NO: 101 - DNA, 1912 bp, rat
ccggtactcctcagtagccatagcagttgtatacccaaatacaaccaacatcccacccaaataaattaaaaatactattaaacctaaaaacgaacccccaaaccctaaaactattaagcacccaatacatccactaacaatcaatccaaacccaccataaataggtgaaggcttcaacgccaaccctagacaaccagtcaaaaacagtaaacttaaaataaacatataatttgtcattatttctacacagcatttaactgtgactaatgacatgaaaaatcatcgttgtaattcaactatagaaacacctaatgacaaatatccgaaaatctcaccccctattcaaaatcatcaaccactcctttatcgacctccccgccccatctaacatctcatcatgatgaaacttcggttctctactaggagtatgcctcatagtacaaatcctcacaggcttattcctagcaatacactacacgtctgataccataacagcattctcatcagtcacccacatctgccgagacgtaaactacggctgactaatccgatacctacacgccaacggcgcctcaatatttttcatctgcctattcctccatgtgggacgaggactatactatggatcctacactttcctagaaacctgaaacattgggatcatcctactatttgcagtcatagcaactgcattcatgggctatgtactcccatgaggacaaatatcattctgaggagctacagtaattacaaacctattatcagctaccccttacattgggactaccctagtcgaatgaatctgaggaggcttctcagtagacaaagcaaccctaacacgcttcttcgcattccacttcatcctcccattcattatcgccgcccttgcaattgtacatcttcttttcctccacgaaacaggatcaaataaccccacaggattaaactccgacgcagacaaaatcccattccatccatattatacaattaaagacctcctaggtgtatttatattactattattcctaataaccctagtactattcttcccagacctactaggagacccagacaattatacacccgctaaccccctcaacaccccaccccacatcaaaccagaatgatattttctctttgcctacgctattctacgctccattcccaacaaactaggaggggtcgtagccctaatcttatcaatcctaatcttagccttcctaccattcctgcatacctcaaaacaacgcagcttaacattccgcccaatcacccaaatcctttactgaatcctagtagccaacctcctagtcttaacatgaatcggaggccaaccagtagaacacccatttatcattattggtcaactagcctccatcagctatttttcaattatcctcattctcataccaatctctggaattgttgaagacaaaatgttaaaatgaaattaatgtcccgatagtataaaaattactctggtcttgtaaaccaaaaatgaagagtcagtcttctcaggacaatcaagaagaaggaactacctccccaccatcaacacccaaagctgatattctacttaaactacttcttgtcagtacataaaatgatatggacattaaaaaacatttatgtatatcgtacattaaattattttcccaagcatataagcatgtaatatatatctaatgatttaggacatagatttaaactcaactataaattcacaacaacatgtctattctcaaatacattagataatgtctattagacatatctgtgttattagacatgcaccattaagtcataaacctttctcttccatatgactatccctgtccccaattggtctctatttctaccatcctccgtgaaatcaacaacccgcccactcgtccccctcttctcgctccgg

SEQ ID NO: 102 - DNA, 821 bp, rat
tctcatctgcacaggaaccaacaggtgctgccttgttaccaccatgccggaagttgagaggaaatctaagatcactgcctcccgtaaactcatgctgaagagcctgatgctagccaaggccaaggagtgctgggagcaggagcacgaggagcgagaggctgagaaggtgcgttacctctcggagcgcatccctacgctgcagacccgcggtctttccctcagcgcccttcaggacttatgccgagagctccatgccaaggtggaggtggtggatgaggagcgctatgatatcgaagccaaatgcctccacaacacgagagagatcaaggacctgaagctgaaggtgctggacctccgtgggaagttcaagcgtccacccctgcgccgggtccgtgtctcagccgacgccatgctccgagccctactgggttccaaacacaaggtgtccatggatctgcgggccaacctcaagtctgtgaagaaagaagacacagaaaaggagcggccagtggaggtgggagactggaggaagaacgtggaggccatgtctggcatggaaggtcgcaagaagatgttcgatgctgccaagtccccaaccttgcagtagaggtgcttagagtgctcttcttggtgcccctcagaatcctggggcactcaggagaagggatgggaggctgacccaacgtacagaactcttaggagtcagctctcttgggttcaagcctactgcagtgtcttcagacactgggcacagcatgcctgtgtcaggtctttttttgctgttgttgttccctcatcaataaaacttgggcttgtatgtg

SEQ ID NO: 103 - DNA, 1842 bp, rat
cgccagagccgcagcttctctcgccccgcagcccgtcgccaccatggtgaagatcgtgacagtgaagacgcaggcatatccggatcagaagccgggcaccagcgggttgcggaagcgagtgaaggtgttccagggcaacgctaactatgcggagaatttcatccaaagcatcgtctccaccgtggagccggcgttgaggcaggaggctaccctggttgtgggcggggacggtcgcttctacatgaccgaggccatccagctcatcgtacgcatcgccgcagccaacgggattggccgcctggttattggacagaatggaatcctctccactcctgctgtatcctgcattatccgaaaaatcaaagccattggtgggatcattctgacagctagccacaatccaggagggcccaatggagattttggaattaaattcaatatttctaatgggggtcctgctccagaagcaatcactgataaaattttccaaatcagcaagacaatcgaagaatatgccatttgccctgacttgaaggtagacctcggtgttctggggaagcagcagtttgacttggaaaacaagttcaagcccttcacagtggagatcgtggactcagtcgaggcctatgccacaatgctgagaaacatctttgatttcaacgcactgaaggagctactctctggcccaaacagactgaagatccgcatcgacgccatgcacggagttgtgggaccgtacgtcaagaagatcctctgtgaagaacttggtgcccccgcaaactcagctgtgaactgtgttcccctggaggattttggaggccaccaccctgaccccaacctcacctacgctgctgacctggtggaaaccatgaagtcaggagagcatgatttcggggctgcctttgatggtgatggggataggaacatgattctgggcaagcacgggttctttgtgaacccttctgactctgtggctgtcattgcagccaacatcttcagcattccgtatttccagcagactggggtccgcggcttcgcacgcagcatgcccaccagtggtgctctggaccgggtagcaaacgccacaaagatcgcttcgtatgagaccccaactggctggaagttttttgggaatttgatggatgcaagcaagctttccctctgtggagaggagagctttgggactggttcagaccacatccgagagaaagatggactgtgggctgtcctggcctggctctccattctggccacccgcaaacagagggtggaggacattctcaaagaccactggcagaagtttggtcggaacttcttcaccaggtatgactacgaggaggtggaagccgagggggcaaacaaaatgatgaaggacctggaggccctgatgctggaccgctcctttgtggggaagcagttctcagcaaacgataaagtctacacggtggagaaagctgataacttcgaatatagtgacccagtagatggaagcatttcaaaaaatcagggcttgcggcttatttttgcagatggttctcgtatcatcttcagactgagcggcaccgggagtgctggggctaccatccggctctatattgatagctacgagaaggacgctgccaagatcaaccaggacccccaggtcatgctggcacccctgatctccattgctctgaaagtgtcccagctccaggagaggacaggccgcactgccccaactgtcatcacctagagagatggctggatgtggcacatcctccccaggaactgtccacactgcctgattgaagagcacagacagaacagtgtattcgacctggcctttagactcatcttatttta

SEQ ID NO: 104 - DNA, 453 bp, rat
atgtccttcagtgctgaccagattgccgaattcaaggaggcatttctcctcttcgacagaaccggtgaatgcaagatcaccttaagtcaggtgggcgacgtcctccgggctctgggcaccaatcccacaaatgcagaagtcaagaaggttctcgggaaccctagcaatgaagagatgaatgctaagaaaatcgagtttgaacagtttctgcccatgatgcaagccatctccaacaacaaggaccagggaggctatgaagatttcgttgagggtctgcgtgtcttcgacaaggagggcaatggcaccgtcatgggtgctgagctccgccatgtcctcgccactctgggagagaagatgaaggaggaggaggtagaagcattgctggcgggccaggaggactccaatggctgcatcaactatgaagcttttgtgaaacacatcatgtctgtctaa

SEQ ID NO: 105 - DNA, 717 bp, rat
tttcgtcctggcctggcccggcccggccccgcgctatggagttcctttgggcccctctcttgggtctgtgctgcagtctggccgctgttgaccgccacatcgtcttctggaacagttcaaatcccaagttccgagaggaggactacaccgtgcacgtgcagctgaatgactatctggacatcatctgcccacattacgaggacgactctgtggcagatgctgccatggagagatactcgctgtacatggtggaacaccaggagtatgtgacatgcgagccccagtccaaggaccaggttcgcgttaagtgcaaccagcccagtgccaagcacggcccggagaagctgtctgagaaattccagcgcttcacgcctttcaccttgggcaaggagttcaaggaaggacacagctactactacatctccaaacctatctaccatcaggaaacccagtgcctgaagttgaaggtgactgtcaatggcaaaatcactcacagcccccacgcccatgtcaacccacaggagaagagactccaagcagatgacccggaagtgcaggttttgcacagcattggtcacagcgccgccccccgcctcttcccattggtctgggcagtattgctcctaccactgctgctgctgcaaactcagtgaaggtatttgcttgccctggcttacggattggcacgggactaaggggcagggttaagcaccccca

SEQ ID NO: 106 - DNA, 453 bp, rat; identical to SEQ ID NO: 104

SEQ ID NO: 107 - DNA, 168 bp, rat
tgcttcccctcacagagactttggctagtgccaaggaagagaacgtggagattcaccagaccttggaccagacccttctggaactcaacaacctgtaagggtggccctgctacctgccgaccagactacatagatgcctcctcaggccaataaacggatgtctctggc

SEQ ID NO: 108 - DNA, 2935 bp, rat
ctaggtcagcatggattcctggttcattcttatcctgtttggcagtggtctaatacacattagtgccaacaacactactacagtttcaccttctttaggaactacaagattaattaaaacatcaacaacagaatcggctaaggaagagaataaaacttcaaattcaacctcttcagtaatttctctttctgtgacaccaacattcagcccaaatctaactctggaacccacctatgtgactactgttaattcttcacactctgacaatgggaccaagagagcagccagcacggaatctggaggcactaccatttcaccaaacggaacatacggaacatggcttactgataaccagttcacggatgccagaacagaaccctgggaggggaattccagcagtgcagcaaccactccagaaaccttcccccctgcagatgagacaccaatcattgcggtgatggtggccctgtcctctctgctagtaattctctttattattatagttctgtacatgttaaggtttaagaaatacaagcaagctgggagccattccaattctttccgcctgtcaaatggccgcacagaggatgtggagccccaaagtgtaccacttctggccaggtccccgagcaccaacagaaagtacccaccactgcctgtggacaagctggaagaggagattaaccggagaatggctgatgacaataagctcttcagagaggaattcaacgccctccctgcctgtccaatccaggccacctgtgaggctgcctccaaggaagaaaacaaggaaaaaaaccgatatgtaaacctcctgccttatgaccactccagagtgcacctgacacctgttgaaggggttccagattctgattacatcaacgcctcattcattaatggctaccaggaaaagaacaaattcattgctgcacaaggaccaaaagaagaaacggtgaatgatttctggagaatgatatgggaacagaacacagccaccattgtcatggtgaccaacctgaaggagagaaaggagtgtaaatgtgcccagtattggccagaccaaggctgctggccatatgggaatgtccgtgtgtctgtcgaggatgtgactgttctggtggactacacagtacggaaattctgcatccagcaggtgggcgacgtcaccaacaggaagccacagcgcctcatcactcagttccatttcaccagctggccagactttggggtgccttttaccccaattggcatgctcaagttcctcaagaaggtgaaagcctgtaaccctcagtatgcaggggctatcgtggtccactgcagtgcaggtgtagggcgcactggcacctttgttgtcatcgatgccatgctggacatgatgcattcggagcgcaaagtggatgtatatgggtttgtgagccggatccgggcccagcgctgccagatggtccagacagacatgcagtacgtcttcatataccaggcccttctggagcattatctatatggcgacacagagctggaagtgacttccctagacacccacctgcaaaaaatttataacaagatcccaggaactagcaacaatggactagaggaggaatttaagaaattaacttcaatcaaaatccaaaatgacaagatgcgtactggttaccttccagccaacatgaagaagaaccgagttttacagatcattccatatgaatttaacagagtgatcattccagtcaaacggggcgaagagaacacagactatgtgaacgcatccttcattgatccgtaccggcagaaagattcctacatcgccagccagggccctcttctccacacaactgaggacttctggcgaatgatctgggaatggaagtcctgctccattgtaatgctaacagaactggaagaaagaggccaggagaagtgtgcccagtactggccatctgatggcctggtgtcctatggagacatcacagttgagctgaagaaggaggaggaatgtgagagctacactgtccgagacctcctggtcaccaacaccagggagaacaagagtcggcagatccggcagttccacttccacggctggcctgaggtgggcatccccagcgatgggaagggtatgatcaacatcatcgcagcagtgcagaagcagcagcagcagtcagggaaccatcccatcactgtgcactgcagtgccggggcaggacggacagggaccttttgtgccttgagcacagtcctggagtgcgtgaaagcagaaggaattttggatgtcttccaaactgtcaagacgctgcggctgcagaggccacacatggtccagatactggaacagtatgaattctgctacaaggtggtacaggagtacatcgatgccttctcagattatgccaacttcaagtgacaggggagaaggcccacagacaggagaattgcctttaatattttgtaatatctgtttttgttaatatacccaaaattgtatatatcttataactgttttggaaatggcacataggcttctattacctattaggtggagattttgtatgtaaatgtgttagcactatagtccttttccagtgttttattggggaattaaatagtgcgatatttgagttgatttaatgaagtccttagcctggaaattgggccagattattctttgcttcaaatgtctttttctaaagaagacaaacataagagtcattccaggtaactcggtgccaactaaaacaaagcacaaagttctcggagctcttgaggaaatggttgtctcacgtccccaggccggcctcttcccttccctgtccctctccagtgcaccctcatctcccaccaatatcagccacctcaggagtggggaataatgagaccagagcagcatccctggcaccacactaggaatcatcaggtaataaacactcttgattcccgg

SEQ ID NO: 109 - DNA, 1624 bp, rat
cagcaccatgacagatcaggcttttgtgacgctcaccacaaacgatgcctatgccaaaggggcgctggtcctgggctcatctttgaaacagcacaggactactaggaggacggttgtactcgccagcccacaggtttcagactccatgagaaaagttttagagactgtctttgatgaagtcatcatggtagatgtcttggacagtggtgattctgctcatctaaccttaatgaagaggcctgagttgggcatcacgttgactaaactccactgctggtcactcactcagtattccaaatgtgtgttcatggatgcagatactctggttctctcaaatattgatgatctttttgaaagagaagaattgtcagcagcaccagacccagggtggcctgactgtttcaattctggagtctttgtctatcaaccctcaattgaaacgtataaccagctgttgcatcttgcttctgagcaaggtagttttgatggtggggaccagggcctactgaatacatattttagtggctgggcaacgacagatatcacaaaacacttgccatttgtgtataacctgagcagcctctcaatatactcctacctcccggcatttaaagcgtttggtaaaaatgccaaagttgtgcacttcctgggacgaaccaagccatggaattacacgtacaatccccaaacaaaaagtgtcaaatgtgaatcccaggacccaattgtgagtcacccagagtttctgaacctgtggtgggacaccttcaccaccaatgtcttacccctgctccaacaccatggccttgtcaaagatgccggttcctatctaatgatggaacatgtcacaggagccttgtcagacctgtcctttggggaggccccacctgcatcacagccttctttgtcctcagaagaaaggaaggaacggtgggaacagggccaggctgattatatgggagcagattcttttgataacatcaagagaaaacttgacacttacctacagtagaagcactgccattttcttgtggacacatccatgtcttaggcacgtttcgatacatagtatgtgaagtctgttacaattgttagaggctttcactaaacctcagcagatgaggggtttgggcaggacaacaggtgagaactgggcaaatgttattaagtaataattctattatgtggacaagtgttgtgtttaaccctagactttttcaaaaactctaaattcttaaattgccaatgtgtgataaagaaaagccaacattgagctactaaattaggctctttcaaatggtgcagaacttgactctccatcttcaaaacaaggtatgagattctccaatatttgcttgttgtatccttcactagacctgcaatgtagaattgttcaaagcctgtcagagaagtagccttctagactaaagtggcctttattaacactgcggagtgattcataagcctaccagctagtgttagttcaccagttttctatgcaccatgaaggcggcatgcagacctgctctttctcagttatctacttgaaaattgcagtgtgctctctgatggtagctgtggaagcactgtgtataacaaataaagacttattgacataaaaaaaaaa

SEQ ID NO: 110 - DNA, 1624 bp, rat; identical to SEQ ID NO: 109

SEQ ID NO: 111 - DNA, 615 bp, rat
ccacatgtgcaaaagtttcccagagagttgggccccacaatgtgtaaaaaagacccccaatggggcagagctgtgtaaccataaaaaaaaaatagtaagagaaatcagtttcccaggaggcctggcttgggtggagcatgtcactcagggccagtccgcatgcggtgtgctgtttgttctggaactgctttcttctgattgttctttcttttccaagccccttactctagggctatggccaccagacggcctgacagagtcctcaggcatggtggtttgtgaggatgacttctttcacacacagataccccaactcagtgcttgcccactggcatcagccccactatgatccccagggcttccccccaacccgtttaaccccttatatcacagtctcggcccccagcttcaccaagtcttccctcaggacacctttgagggacactgaaacaaaacagataaaggcccggccccccacccaccaagtggcacagtggggtacgggggattgtatcaccccgtcacacctaaggcaggtgttttagtgtctgattctgtgagtgtggataggggggtggcacatctgtgtgggtatgactttggcaggaagtgggg

SEQ ID NO: 112 - DNA, 912 bp, rat
cgggcggcgctgcaggctgagatcgaggagctgcgggccactctggagcagacggagaggagcaggaagattgcagagcaggagctgctggacgccagtgagcgcgtacagctcctccacacccagaacgcgagcctcatcaacgccaaaaagaagttggaaaatgatgtttcacagttgcagagtgaagtggaggaagtaattcaaagagcacgcaatgcagaagagaaggccaagaaagccattactgacgccgccatgatggcggaggagctgaagaaggagcaggacaccagcgcccacttggagcggatgaagaagaacatggagcagacggtgaaggacctgcagcaccgtctggacgaggctgagcagctggcgctgaagggcggcaagaagcagatccagaaactggaggccagggtacgtgaacttgaaggagaggttgagaatgaacagaaacgtaatgctgaggccgttaaagggttaaggaagcacgaaagaagagtaaaggaacttacctaccagaccgaggaggaccgcaagaacgtgctgaggctgcaggacctagtggataaattacaggcgaaggtgaaatcttacaagagacaagcagaggaggctgaggaacaatccaacgtcaacctggccaagttccgcaagctgcagcacgagctggaggaagccgaggagcgggcagacatcgccgagtcccaggtcaacaagctgcgggtgaagagccgcgaggttcacaccaaaatcagtgcagagtaaacgcatcttgaggaggccgccaagtggctgaaggaaaggcacagaatgtgctgccttgggtcgcttgctgggtcgcttgcctctcgtgtttacttttctcccactgctgactgaataaaaccacaactcattgtaatt

SEQ ID NO: 113 - DNA, 3138 bp, rat
ttttctttttttcctctggcaagcctgctgctggtaggcacccccaggtagaagctgcgtctaaatcctttattgcctcttcctcaggaatacctattgctctagggtcatagttcacctatttaagctggtcagaggccagccaattttctgataggatttaaactttgaagagactgtagccatttttttcctcagatgacagaatcacttcaacttccactttgtaatcgcttcctttccttgaaggtagctgaatcttgttttctttaaaaacgtcttccttccaaagttgcctgccatgccgaccgttattagtccaactgtggccccaaggacaggagctgagcccaggtccccagggccagttcctcacccagctcaaggcaagaccactgaggctggaggtggacacccgggtggcatctattcagccatcatcagccgcaattttccgatcattggtgtgaaagagaagacattcgagcagctccacaagaagtgcctagagaagaaagttctttacctggatcccgagttcccaccggatgagacctctctcttttacagccagaagttccccatccagttcgtctggaagagacctccggaaatttgtgagaatccccgatttatcattggtggagccaacaggactgacatctgccaaggagatctaggggactgctggcttcttgcagccattgcctgtctgaccctgaatgagcgactgcttttccgagttatacctcatgatcaaagtttcactgaaaactacgcagggatcttccacttccagttctggcgctatggagactgggtagatgtggttattgacgactgtctgccgacatacaacaaccagctggtcttcaccaaatccaaccaccgcaatgagttctggagtgctctactggagaaagcatatgccaagctccatggttcctatgaagctctgaaaggtgggaacaccacagaagccatggaggacttcacaggaggggtgacagagttttttgagatcaaggatgctccgagtgacatgtacaagatcatgaggaaagctatcgagagaggctccctcatgggctgctccattgatgatggcaccaacatgacttatggaacctctccttctggtctgaacatgggggaattgattgcgcggatggtgagaaatatggataactcgctgctcagagactcagacctggaccccagggcctcagatgacagaccgtcacggacaattgttccggtgcagtatgaaacaagaatggcctgtggactggtgaaagggcacgcctattcagtcactgggctggaggaggccctgttcaaaggcgagaaggtgaagctggtgcggctgcggaacccctggggccaggtggagtggaacggctcttggagtgatggttggaaggactggagctttgtggacaaagacgagaaggcccgtctgcagcaccaggtcaccgaggatggagagttctggatgtcatatgatgactttgtctaccatttcacaaagctggagatctgcaacctcacagctgatgccctggagtccgataagcttcagacctggacagtgtctgtaaatgagggccgctgggtgaggggctgttctgctggaggctgccggaacttcccagacactttctggaccaacccgcagtaccgtctcaagctcctggaggaggatgatgaccctgatgactctgaggtgatttgcagcttcctcgtggctctgatgcagaaaaatcggcgcaaggaccggaagctgggggccaacctcttcaccattggcttcgctatctacgaggttcccaaagagatgcacgggaataagcaacacctgcagaaggacttcttcttgtacaatgcctccaaggccaggagcaaaacctacatcaacatgcgggaggtgtcccagcgcttccgcctgccgcccagcgagtatgtcattgtcccctccacttacgagccccatcaggagggggaattcatcctccgggtcttctctgaaaagaggaatctctctgaggaagctgagaatacaatctctgtggaccggccagtgaaaaagaaaaaaaacaagcccatcatcttcgtttcagacagagcaaacagcaacaaggagctgggtgtggaccaggaggcagaggagggcaaagacaaaacagggccggataaacaaggggaaagcccacagccacggcctggccacacagaccaggagagtgaggagcagcagcaattccggaacatcttcaggcagattgcaggcgacgacatggagatctgtgcggatgaactcaagaatgtccttaatacggtggtgaacaaacacaaggacctgaagacacaagggttcactctggagtcctgcagaagcatgatagctctcatggatacagatggctctgggagactgaatcttcaagagttccatcacctctggaaaaagatcaaggcctggcagaaaatcttcaaacactatgacactgaccattctggtaccatcaatagctatgagatgcgaaatgcagtcaatgatgcaggcttccatctcaacagccaactctatgacatcatcaccatgcgctacgcagacaaacacatgaacatcgactttgacagcttcatctgctgcttcgtcaggctggaagggatgttcagagcttttcacgcatttgacaaggatggagatggcatcatcaaactgaacgtacttgagtggctgcagcttaccatgtatgcctgaaccagatgacctcatgtaagatcaaccaggattccatctcaacacgacacagctagggctgtttaccacaaggaacccagtaggcacacctccaccaaactgggctcctggtcacgttccttctccactttgacccaagtcttggtgcacagccacctcaagtgtctggcttgctgggagctctgcagacgctgtctacatagcttgtaactgggttgtccacagccctgtcaccatctgcactcagttctgccagttttagggtgggtctactctggggtccatagggtgtggatacctgacaaaaatgtggctacacttctgaaagaatctatctaaataaaggcacgcacatggctggttccaccatt

SEQ ID NO: 114 - DNA, 517 bp, rat
gagccctttggtttttactcattttaagtgtgtttatgaagcaagacaaaacaaacttccaaaaaaaaaaaaataccctcgaaactctgctgagagcatttagcattctgtgctcaccgaggaggacatttatttccgtttccaagacacttggacccctgcgtctccggcaaggtctgcgacaacgtgactaaaaagcagccagctgcttcccgttctccgaaacgagatgttttcccgtgagagacgctgtccgagctgtccgagatgtcgtcacttttataaatctgaattcagattccattcttcgtgagctcactttataatttgtatttttttactgtatagactaaatatattctatgtcaactcctgactccccccacccccacccgtgaacagtattgaagcccccaacagctgatgatgaattaactgatccccctccccctcgtcttaggatattctgtgggttgaatgcgtacttcttgaaaccggaactgatctgcacactgta

SEQ ID NO: 115 - DNA, 4514 bp, rat
tgaagtttgtggagcgctttctcaccggctggtccgggacgatagccggcgcctcgctcttcggtgaccgccccattctctcgggattccttctctgtggtgacggacgctctagacgctcggtaagggaagctgaggctggcggcgggagttcagaggaggagcgcggagaggttgctcgctgacagcggcgcggctggacgcggacggcgtcgggctctggccggctgagagcttcgcccaccttccccgcggcctgtgcgcaggcgatgctgcggccccgaggcgcggcgcggcgagcagggagggcgcctccgagagcctagagctggtttccgtcctcttccccggggcaagtgggcatggaacagtgagagcccctcgctcggcgaggccgcgcgcggaggctccccatggccgggacgtacagctccacattgaagactctggaggacttgaccttggactccgggtatggggccggcgactcctgccgctcgctcagcctttcgtcttccaagtccaactcgcaggcgctcaactcttcggcgccgcagcaccgcggggcggcctggtggtgctactccggctccatgaacagccgccacaacagctgggacaccgtgaacacagtgctgcccgaggatcccgaagtggccgacctcttctcgcgctgcccgcggctcccggagctagaggagttcccttggaccgagggagacgtggctcgggtgctccgcaaaagcgtcggcggccggaggctgccctcattctccgccgaggctgtgaggcgcttggccggactcctccgccgggcgctcatccgcgtggcccgggaggcgcagcgcctaagcgtgctgcacgccaagtgtacccgcttcgaggtgcagagtgcggtgcgcctggtgcacagctgggcgctggccgagagctgcgcgctggcagcggtcaaggcgttgtccctctatagcatgagcgctggcgatgggctgcgccgcggcaagtcggcacgctgcggcctcactttctccgtgggccgtttcttccgttggatggtggacactcgcatctccgtgcgcatccatgagtatgcggccatctcgcttacggcttgcatggagaacttggtggaggagatccgggctagggtcctggcgagtcagagccctgatggcggaggggcaggaggcggagaggtatccgctgaggccttggagatggtcatcaacaacgatgccgagctctggggagtcctgcaaccctatgagcatctcatctgcggcaagaacgccaatggtgtcctctccctccctgcctacttcagtccctacaatggtgggtccctgggccatgatgagcgagcagatgcctatgctcagctggagcttcggacactggagcagtcactcctggctacctgtgtgggcagcatctccgagctgagtgatctggtctctcgagccatgcaccacatgcaggggcgccaccctctgtgcccaggcaccagccctgctcgccaggcccgccagccaccacagcccatcacatggtcccccgatgctctccatacactctactacttcctgagatgtccacagatggagtccatggagaaccccaacctggatcccccaagaatgaccctgaataatgaacggcccttcatgctgctgccaccactgatggagtggatgcgggtggcaatcacctatgcagaacaccgtcgcagcctcactgtggacagtggcgatatccggcaggcagcccggctgctgctaccaggcctggactgcgagccccgccagctcaaacccgagtgctgcttcagttccttccggaggctggacgctcgagctgctactgaacgcttcaaccaggacctgggcttccgcatgctcaactgtgggagaacagacctcatcagccagccatcgagccctgggccagacggggtgaacacaatggatgaccagggtctgacaccgctaatgtacgcctgtgctactggggatgaagccatggtccagatgctcatcgatgctggagcaaacttggatatccaggtcccaagcaactctcccaggcatccttctgtccatccagacagcaggcactggacctccctgacattcgcggtgctgcacggacacatctctgtagtgcagctgctacttgatgctggtgcccatgtggagggctcggccgtgaacagtggggaggacagctatgccgagacaccccttcagctggcctctgcagccgggaactatgagctggtgagcttgctactgagccgaggtgccgaccccctcctcagcatgctggaagccaatggcatggcttcttccctccatgaggatatgaactgcttcagccactcagctgcccatggccacaggaatgtcttgaggaagctcctgactcagccacagcaggctaaagcagatgtgctgtccctagaagagatcttggctgagggcgtggaggaaagcgacacatcgagccagggcagtagcgaggggcctgtgaggttaagccggacccgaacgaaggccctgcaggaagccatgtactacagtgctgaacacggctacgtggacatcacgatggagctgagggcactaggtgtcccctggaagctgcacatctggatagagtctctgcggacctctttctcacagtcacggtactcggtggtgcagggcctcctgagagatttcagctccatcaaggaggaggagtacaatgaggagctggtgacagaaggcttgcagctcatgtttgacatcctcaagaccagcaaaaatgactccgtcctccagcagctggccaccatcttcactcactgctatggcaccagccccatccccagcatcccggagatccggaagaccctgccagccaggctagatcctcactttctgaacaacaaggagatgtctgatgtaaccttcctcgtggaaggaaagctgttttatgcacacaaagtccttttggtgacagcatctaacaggttcaaaaccttaatgaccaataagtcagagcaagatggggacaacagcaaaaccattgagatcagcgacatcaagtaccacatctttcagatgctgatgcagtacctgtactatggaggaacagagtccatggagatccccacggctgacatcctgcagctcctgtcagctgccaacctgttccagctagatgccctgcagagacactgtgagatcctgtgctcccagacccttagtgtggagagtgctgtcaacacctacaaatacgccaagatccacaacgccccagagctggccctcttctgtgaaggcttcttcctcaagcacatgaaggccctgctggagcagatgccttccggcagctcatctatggccgaagcagcaaagtccagggcctggacccactgcaggatctgcagagcaccctagctgagcgagtacattctgtctacgtcacctcccgggtgtgagccagggtggatggtgactgctatctgagggtgtacaaaggtctgttaaagccagaaaccaccagcgacacccccagtggagggaggcttgtaggccttctggggtaggctctcggggggtacgtcctgctcttcccctagattaccctctgtggtgttgactgatcctgaggtggaaggagagtccacttcactgttgctcggccagtaactggcaggggtgtgacgtaattgcaccctgagggctaccctgtgccctctcccctccagtggctcagcgtcgagccgatccacctcagcaccagccatcctggctggggatgttaggatcacaggcattcttatgaatgtagaaagtgtccgagcccaggccactgggtgcaggagccgctatgtttggtttcctaacagagagaggctaagtcctgccctccaagctgtgcctttgaaagggctgggccctgttggtgaaaaccagacctccagtgccctccctacaagactactaacgagagtctgaactgggaatccctgagcaccgggtatgctgggctacaggagctggcagccacaggaggcccagccccatcatgtctgtaggctgaggcagcagggcttcaatggcctcaagtgcagggcgccttccactcagggctggggtgcaagagcacacttctcacctgggttccgtgactctggggcatgaacggacagggccttggtggaagagaagctgtgtcctctcccctcctgtcctcagtcttggctccccatcctctgacctgtttgtggacagacgctgggacacgatcaagaacagctaccttagaaactatttattcatcagaagcccccagggcttgcaatcctggaacaatattttcaacttgctgcttgtgctggatgtacaaaagaatgaatggtattttattgctgtaatattgtatgatactgtaactataccttaatgttgttacttactgtaaatgtactatggttttatcaacaataaacactcattaacattgac

SEQ ID NO: 116 - DNA, 3732 bp, rat
tgacatgctggagctgcggcaccgcgggggctgccccggccccgggggagcggggacgccgccaccccgcgagggagaggcggccggcggcgaccacgaaaccgagagcaccagcgacaaagaaacagatattgatgacaggtatggagatctcgatgccagaggagattccgatgttcctgaggtcccaccatcctcagacaggacccccgagattctcaagaaagccctgtctggactgtcatcaagatggaagaactggtggattcgtgggatcctcaccctgaccatgatctccctcttcttcctgatcatctatatggggtccttcatgctgatgcttctggttctgggcatccaggtgaagtgcttccaggagatcataaccatcgggtacagggtctaccactcctacgacctcccgtggtttagaacactaagttggtacttcctcctatgtgtgaactacttcttctatggagagacagtggcagattacttcgccacgttcgttcagaaggaggagcagctgcagttcctcattcgctaccacaggttcatatccttcgccctctacctggcaggtttctgcatgttcgtcctgagcttggtgaagaaacactaccgactacagttctatatgttcgcatggactcacgtcactttactgataaccgtcactcagtcacatcttgtcatccaaaatctgtttgaaggcatgatatggttccttgtccccatatcaagcgtcatctgcaatgatatcacggcttacctttttggatttttttttggaagaactcctttaattaagctgtctcctaagaagacctgggaaggattcattggtggtttcttctccacagtcatatttggattcattgctgcctatgtgttgtccaagtatcagtactttgtgtgcccggtggagtaccgaagcgacgtcaactccttcgtgacagaatgtgagccctcagaagtgttccagcttcagaattactccctccctccgttcctacaggcagtgctgagccgggagaccgtgagcttgtaccccttccagatacacagcattgccctttcaacatttgcatcactgatcggcccattcggaggcttcttcgccagtggattcaaaagagctttcaaaatcaaggactttgcaaacactattcctgggcatggagggataatggacaggttcgattgtcagtatttgatggcgacgttcgtgcacgtgtacatcaccagcttcatcaggggtccgaatcccagcaaagtgctccagcagctcctagtgcttcagccagagcagcagttaaacatctacagaaccctgaagatacatctcacggagaaaggcatcctgcagcccacctggaaggtgtagctgtcctgaggggacagactgctgaggaggaaggagctcacagagcagctccgactgaagtcttgcactgagccagcctggggctagaaactcagtagatgcaggttttgcagatacgaatgtttctctttctctgaaattactgtgaatatttaacaaacacgagatctgagacgagtgcgcatcagtcgccgccgtgaaagatccgtgcttttctaagatgtattttccaatgttaagttctccgcccttactggccgggctccatgatgtaggaggtttaaagagtcaagcactgtcacctgaggctgaggcccccttaggctcgtgcctggcagtgtgatccttctcacaaacactgacctttgcactgactgggagctgcctctctgtggctggggatgctcagcaggcaccctgggaagcgaggcctagggcttcctcctctactgacctcaggcatttctgcaggctgagttagattaaaaaagaaagaaaaagagcgcttgtccacttctctctcttctttttgtttgtttgtacacaccaggcaggcgccccactcctaggctctgttccggctggaccgactgcctactttcagagaaacagccatctgcccagtggaaacaccctggttttaagtagtttcaaaccaaaaggtagaggctgaaacttaccccactattgatttgtttaaaaagaaggcatcagaatccatctctgatgaaacttttggagaagcacgtaaccaacttcccaagagactcaggagtgggtcctgctcctccaccaaaacacctcacccaggacggtggtgctgtgagcaggggtggaggctgagtcggcaggctgcctggggtgagctgagcactgcatggcggtgccaggcctgcctccatctctgtgtacagcacacctggagacgagggttttccctgaagacccagctcagagccagccccctgatggcaattaacctctgtcaccttgcacttcctgtcatgccatgaaaaccaagagtaaagatcaagcagaaataatagccatgaagcagaaaagcacaggaaagccacgccctcttctgtaggtgggcagggcactgtaaacactctagcccatcacagcaccgttgttaactaagctgcctccaagtgtgctctgcagccatattgaaccaaatgtcagggtcacccgcagagatgacctagttccccaagctcagcaccgagaggtggagaaatggagacaccataaaggataatttggtcatgaaagagtaaatatttttgtttaaattagaaatggattccagtcaccacatttccttcccagtgtggatgaacccacagccatcctgggctctgtaagcacatggcgtatgtgtgagcatggcagacgctgtggtcctcagtcccaaaatgccactgttggcccctaggtgacttgtgaccctgggctccattcaggctgtgtcctctgcacgcaggcagccgagggagcattggccacattacagtgactccctctcagtcaggacaccggggagctgatgtcagcttccctgcttttgtttgtccctcgccctgccccagaagttgaccatgacccagttgcaggcaccgaggaagctgagagaagccttgtgataggatcattccccgagaacagggcagtttgcaaaggtgtaaaggatgcctggggacagggtggattctccttacccaccgtgctgtccaggcgtcgtgaggggttgcgaggcagaattatgagagcattacttaatacacgtattaaaagtcaatattcttctaaacaaaggatgaaagcaggttacggcaaaagcttttcttaaatagattttcttagagctgggtgtccattacgccatattaaaacaagggcgttccctgacaacgccctagagatgaacattttagcgtactttcacagcgtgtatattaaagtggactatacttcagcaagcaatcatcctaagagccatgtgatgagcgctacatttgcactggaagaagcttcatccagcggagtgacgcagtggacaaatgtcaggccctccaggcggggacccttcagtggaaaactgccgcttgaactgctgctgacttgttagcccgtgggatgatgatgtccgagaatggggcgttctccccagccttccttgtgggtttgcacagacagttgctgtcatggcgacacctggtttgatgaaaggtcgaggcgctgtgtatatactgtacagggtgagagtttatgatacgtgtcaatcagttctctaaatctttatactgaaactgggatagaaaaataaaaatccaaca

SEQ ID NO: 117 - DNA, 1568 bp, rat
gaactaagtgggttgtccgggttccgagactagcgctctgcagagacaccagatcgctggaccctctcacaggaaggcgtcatgccccaaaacgtagttctcccgggccctgcgtcctgggggttcagactctcaggaggcatagacttcaaccagcctttggtcatcaccaggatcactccgggaagcaaggcagaagccgccaacctgtgccctggcgacatgatactggctatcgatggctttggtacggagtccatgactcatgctgatgctcaggacaggatcaaagcagcatcttaccagttgtgtctcaagattgacagggcagaaactcgcttatgtcccgcagtgtcggaagatgggaaagcgcatccctttaaaatcaacctagaggctgaaccgcaggatgtgaactactttgaacacaagcacaatattcggcccaaacctttcataattccaggccgaaccagtggctgcagcactccttccggtattgactgtggcagtggacgtagcaccccttcttccgtcagtaccgttagtacgatctgcccaggtgacttgaaagttgctgctaagatggcccctaacattcctttggaaatggaacttccgggcgtgaagattgtacatgctcagtttaacactcctatgcagttgtactcagatgacaatattatggaaacacttcagggtcaggtttccacagctctaggggagacaccctccatgagtgaacccacagcttcagttccccctcagtcggacgtgtaccgaatgctgcacgacaatcgggatgaaccagctgctcctcgccagtcaggctccttcagggtcctgcaggagctggtgaacgacgggtctgatgaccgtcctgctggaactcgaagtgtgaggccggttactaaagtccatggcggggctggcggtgcccagaggatgccactctgtgacaagtgtggcagtggtattgtaggtgctgtggtcaaggcccgggataagtaccggcaccccgagtgctttgtgtgtgctgactgtaacctcaacctcaagcagaaaggttacttcttcgtggagggggagctgtattgtgagatgcacgcaagagcccgggcgaggcccccagaaggctacgacaccgtcactctgtaccccaaagcttaaattctttacagacgagaacactcattcacgcatgcgcacacacgaacaccggcggatgataaggaggacttcaagcaggaggagtgcgaaggtcacctcccaatcgaaagcgaggcttttagtcatttatcttactgtgtagtgagggaaagacatggggagcagaggcctgcctactgacaaaagtattatctgtgggttgtaattctttatctttggggacagcaatggtgacatttaaagcaataacgttgtaataccatgctctacggtttccatctgttacacgcccatccgatgcgtgaacacctggatatgtagggggggtccacttgtctttccttccaagttgcttttggtaattgtagtaacgccaaattacagctttgtactggaac

SEQ ID NO: 118 - DNA, 4409 bp, rat
ccacgcgtccgatggggaagaagcagccgagggcagcagcaagtgctgctccaaactgtgagctaaaatcctattctaagagcacagatcctcaggtatctaccatggtgttggatcctgaagaaaagattccagacgatggtgcttctggggaccatggagactcggccagcctcggtgccatcaaccctgcttacagcaactcttccctcccacattccaccggggattctgaggagcccttcaccacctactttgatgagaaaatccccattcctgaggaggagtactcttgttttagtttccgtaaactctgggccttcacaggacctggttttcttatgagcattgcctacctggatccaggaaacattgaatctgatttacagtctggagcagtggctggatttaagttgctctgggtgctcctgctggccactattgtggggctgctgctccagcgtctcgcagctcgactgggagtggtcaccggcttgcaccttgctgaagtgtgtcaccgtcagtatcccaaggtcccacggatcatcctgtggctaatggtggagttggcaatcattggttctgatatgcaggaagtcattggctcagccatcgccatcaatctcctgtctgccggaagggttcccctgtatggtggagtcctcatcaccatcgcagatacttttgtatttctctttttggacaaatatggcttgcggaagctggaagcattttttggctttctcatcactatcatggccctcacatttggatatgagtatgttacagtgaaacccagccaaagccaagtactcaggggcatgttcgtgccatcctgttcaggctgccacacccctcaggtggagcaggcggtgggcatcgtgggagctgtgatcatgccacacaacatgtacctgcactctgccttagtcaagtctagacaagtgaaccgggccaataagcaggaagttcgagaagccaataagtacttcttcatcgagtcctgcattgcactctttgtttccttcatcatcaatgtctttgtcgtctccgtctttgctgaagcattttttgagaaaaccaatgagcaggtggttgaggtctgcagaaatagcagcagcccccatgctgacctctttcctaacgacaactctaccctggctgtggacatctacaaagggggtgttgtgcttggatgttacttcgggcctgcggccctctacatctgggcggtggggatcctggctgctggacagagctccaccatgactggaacctattctggccagtttgtcatggagggattcctgaacctaaaatggtcgcgctttgcccgcgtgatcctgaccaggtctattgccatcatccctaccctgcttgttgctgtcttccaagatgtggagcatctgacagggatgaatgatttcctgaatgttctgcagagcctacagctcccctttgccctcatccctatcctcaccttcacaagcctgcggccagtgatgagtgagttctccaacggaataggctggaggatcgcaggcggcatcttggtccttctcgtctgctccatcaacatgtactttgtcgtggtctacgtccaggagctagggcatgtggcactgtatgtggtggctgcagtggttagcgtggcttatctgggctttgtgttctacttgggttggcagtgtttgattgcgttgggcctgtcgttcctggactgtgggcgctcggtaagcatctctaaagtcctgctgagcgaagataccagcggtggcaatactaagtaaacactgggtcagcctgtctgtctgtctttgcagggagccatcagagccagtgtgtttctatggtttactgtgtgaacatagccacaagtatgtgccgttgcacagactgcatttagggaccaactgttagttgggaaacactggggtgggtgtgtggtgtgtgtgtgtgtgttgtttccttctgtctttgtcaaatagcatgctgctattaaatgcttggtggcctaaaactctgtgtagcctaggctgccttcaaacttacagcaatcctcctggctcagcctcctgggtgctgggattccaggcatgtctaccgctcctggctgtcacgagtgcttacaagatgactggttttgtcaggggaggtcttaccctgtagcattaggcagcaccttgaaaaggtgagccttgagctgttttgaacactaaattcctaaatagctgtccaaggccatggctcggttttagttctgagaaacccaaccagactgttgtcatcatttgaattgcagaattagagaccgctatttttgagttcaggatttctgtttgtttggtgcatttcattttgtttttcaagacaagggtttcttccttgttgtcctggaacttactctgtagaccagcctggctttgaactcacagagatcctcctgcctctgcctctgcttcccgactgctaggattagaggcatacaccaccactgccctgctaagctcagagttttttatttctactttggaattcctcagtggaaagaaaggtagagcaggagagggggtgtggtcaagtgatggctcccctccaggtccttgcaggtttaccttaaggagtggagcttagcagggcttcatctgtagtcctgaggctagtgacttccctgttaatagcaagcatcccgatagtgtttcatctcgagtacacacagtcctggaatctccgccttcctctcctgagagagtgcggatggcaaaagactactgtagcacttgtgaactggctcacagcaaatcccagagctgaccgcactactcccgaaagtacccttcaccaaatcttggctctgacccaccgctgtttcatgcccaagataactcagaaggcaacctcaggagctctggacccaaaccttgcaaagtcagtagttgtcactgtgatgcaaagtcctctccctgcaaggtgggactaggctgcctcctcacagcccttccctcggagagaaagcctcttgagaccaggctgcggagctctggagattcagcacgggactacagaactgctgctctcagttcagccacttctgtcctggcacgtgggagacatgattctgtcacatcaagtcctgtctgtttgctggaaaggaataatacaagtttgtataatcattgccttggtggcaacaggagctacagtgacttcgaaggatgtcgtcctctttgccgctttcccagttcgactgtcccgacaaatgacctgcattgtggtgccactgtggcattagtgctagcatttcacacagtcagaagctcagcctgcatagagtcctgtgaggcatgaagggtaaatgcagtttcactcagcctggttgacctcagccccacagctaacacaacacagtcaggccgcgggtccctcactgcggcattctcaacccctgggttgccacccatttgcagcccctatatccaaaaccatttacattatgatttataacagtagcagcattagttgtgaaatagcaaagattttatggttgggggttaccaccacaaagggtcgcagcagcaggaagtttgagaaccctgcaccacagggtccatctcacacctgcctctgccaccattgttcccaaaactgactggaaactgagcttttgaaactgtctcgatgtggtgcttgagggccagattgacagtagcagaattactggaatggatgctctagtgacatctgcatttgtacaggggcggggttgggcggggcggggcggggttgggcagggtgtgttcagagtcactgtacttacagtccagcccagagctgctggcagtcatgcccaggggtctgccttgtgcgtgctagcaaggctgtgctgcagatctcacttcctgccccagagttctgctgtagtatgttcgtttacagtgatagacggttccattgtgtacgacggtctctgactctatgcctacagtatttacagtgtcaaagattaaaagtgtcgcctgtccatttggccgtcactgggaaacagtgcttccaacagtgctctgtacgtaacctgtaagcatttcaaccccgccacgccagtgtggcctggcgttacgttggcgagccatcttgtacgttctcacttggtcctcgttcttctgcgacctgaaatagttgttccctctgctctgggagctggcggctggggaacagcagcagcttgtcttgtaaggtcctgccaggagggcaacaagtgactataaggaggctgttagtgagcctctgacagcttgtgaacttgctgtaattaaaacaaaaacttccctgttaaaaaaaaaaaaaaaaaaaaaaaaaaaaaaaaaaaaaaaaaaaaaaaaaaaaaaaaaaaaaaaaaaaaaaaaaaaaaa

SEQ ID NO: 119 - DNA, 2436 bp, rat
agctttccggggcagcgagtggcggggccgggtgctgagcgagcggggcgtggagagcgtcgcgcggcccctcgcgccgggctccgtttgcaggccacagcccccgcgaggtggcccgccggccctgggccgcccgtcctctggcagctgtggtgagcgcagcgtcgggccggcatgaaggtcacgtcgctcgacgggcgccggctgcgcaagatgctccgcaaggaggcggaggcgcgctgcgtggtgctcgattgccggccctacctggccttcgccgcgtcgagcgtgcgcggctcgctcaacgtcaacctcaactccgtggtgctgcggcgggcccggggcggcgcggtgtctgcgcgctacgtgctggccgacgaggcagcccgcgctcggctgctgcaggagggcggcggcggcgtggcggcggtggtcgtgctggaccagggcagccgccactggcagaagctgcgggaggagagtgccgcgcgcgtcgtcctcacctcgctgctggcctgtctgtccgccggaccgcgggtctacttccttaaaggtgggtacgagaccttctactcacagtatcctgagtgctgtgtggatgcgaagcccatttcacaagagaagctcgaaggtgaaagaggcctcctcagccagtgcggaaagcccattctcagcgtcgcctacagaccagcttatgaccagggtggcccagttgaaatccttcccttcctctaccttggaagtgcctaccatgcatccaagtgcgagttcctcgccaacctgcacatcacagccctgctgaatgtttcccgccggacctctgaggcctgcacaacccacctacactacaagtggatccctgtggaggacagccacaccgccgacattagctcccactttcaagaagcaatagattttattgactgtgtcagggaagagggaggcaaggtcctggttcactgtgaagccggggtctcccggtcgcccaccatctgcatggcttacctcatgaagaccaagcagttccgcctgaaggaggccttcgagtatatcaagcagaggaggagcgtggtctctcccaactttggcttcatgggacagctcctgcagtatgagtctgagatcctgccctccacacccaccccccaacctccctcctgccaaggggaggcagccagctccacctttataggccacttacagacactgagccctgatatgcagggtgcctactgcacattccctacctcagtgctggcaccggtgcccacccacgccaccgtcgcagagctccacaggagccccgtggccacagccacatcctgctgagaccggtcggctaccagcgcatccccaagagcaactgtgacctttggattttttaaacttgtggacatttcatacccgtgcaatactgaagacctctctctgtcccgctgccccggtgagatggtgaggggtcagcaggcttgcagatgcacttcaggctaacccggaggatggtttctcgcgattgtaggaaggccaagccatgcccccctagcacagcggcgtgctaactactgtacttccagaagccccgcccactcaggaccgcctcatccttgcacctcagaagtcccggcttctcatttcaagtgtaaggcaatacacagtcgcagcaaagtaggagcaagctgtgctggaccaggaggggaggagtccgcccgtctgggaggaagcacaagtttcactgttaatttgaatttcggccaactttgtctgtctctgtcctctgtcacttcagggaagagagctggtcaccgctcagtcagaaaagttaaccccgctggatttgtcaagacaaaaggacctgcccgtctgaacccagtgtttctgaggttctgtctaggatcccatggaagctgttggtgtaaggagaagctcctgactcattggagtttcttgctcaccgagggctccttggtgaccttggactttggcatggtttttacaaatacttgaacctgtcccattgtatctctccctaaagcacctctggtgtcattcagaaagttgtcagaccctagaccaaaaaccacccctttgagggggtagcaggaactgcctgcgttctgggtcagtggtggtgactgacatactttttcagtttagtgtcctgtgtgctttttttgtcatccattgtgacaatgtttccctccctaccctggggagtcgttttcaaactactgattctggggtctgcatcgtttgcaatgtggtactactatgtccttcgtagattgtttttccaaggggggaaaggcaataagtcacccccaaacccatgtgaatgtgaagaaaagcagtgttgatgttttttttatatatatatatatacatgtagtacaaaattaaaaaaatgtcaaaaaataaaaataaaaagtgctaagtgaa

SEQ ID NO: 120 - DNA, 1712 bp, rat
ggccgctgcacctgcccggtcttgcgccgagaccgctgtcaatcgcggggcaccaggaataaaaggccccttgcagagatttgaaaatggccatgaacaaaagtgttggcctcttcagctccgcatccctggctgtggactacgtagattccctgctgcctgagaatcctctgcaggaaccctttaagaatgcttgggtctacatgttggacaactatacaaagttccagatcgcaacctggggctccctgatcgttcatgagacgatctatttcctgttctctttacctggctttctattccagtttatacctttcatgagaaagtacaagattcaaaaggataaaccagaaacctttgaaggccagtggaagtgtttgaaaggaattctgtttaatcatttttttatccagttgcctctgatttgtggaacatactattttacagagtttttcaatattccttatgattgggaaagaatgccaagatggtatttcactttggcaaggtgtttgggctgtgcagtcatcgaggatacctggcactatttcctgcacagactccttcaccacaagaggatttataaatacattcataaagtccatcacgagttccaggctccatttggaatcgaagcagaatatgcacatcccttggaaaccctaattcttgggactggatttttcattggaattgtgcttttgtgtgatcatgtaattcttctgtgggcatgggtgaccatgcgtttgctagaaaccatcgatgtgcacagtggttatgatatccctctcaacccgttgaactacatccctttttataccggggctcggcatcacgatttccaccacatgaacttcattgggaattacgcctccaccttcacgtggtgggacagaatctttgggacggatgtccagtaccatgcctacactgaaaagatgaagaagcttgggaaaaagtctgagtgagcacctgctctccgccctcctgactgcagctggcaactaacattgcttctggggagcagaactaagcacgtgactcggctgctggtgataggaacattaacaacctttaagtactctgcgggatgagaactcttctgctcgacacccaagatctgtaaatgtgggaacaaagaaatagatacataagtacagttttcaggaggaggttttaaaggccatattgccaacctcaccgaaaggtttcaggaacccgaggaagtgttaatgtacaactcaccacttcacgccacccgaggctgaagttgacgttgccttttaagcctttttacatacactggccatttcagaaaattctcaacaataatgtctgccttcgagtttaagtcatggtgttttttagaattgacttgaaatgaaaatatcacaaagtgaatatatcagctggtgatcgagtgactgaaacccccctggtctgcggttgaccagttcaggactattctttctgtgaaggattgtttgattgtagtatctttatcagcatcttgtaaattggctcatttcctacgtgatgtacatagaatactataacttaacgactttcaagttacttggggcatttttaaattgaggagccccacttctgatgtccacccccttgtctttgtgtgtcaggtggtctcggagctttgtgaattctctatctgcacctgtcagagctggtgaaataaatgtgatttttgtccg

SEQ ID NO: 121 - DNA, 1502 bp, rat; identical to SEQ ID NO: 29

SEQ ID NO: 122 - DNA, 2169 bp, rat
atggcaggtgctgaaggcttccagtacagggctgtatacccattccgccgggagcggcctgaggacctggagcttcttcctggtgacctcctggtggtgagccgggtggctctgcaggcactaggtgtggctgatggaggagagcgctgcccacacaacgtgggctggatgcctggcttcaatgagcgcacccgacagcgaggggacttccctggaacatatgtggagttcctaggacctgtggctctggctcgaccaggccctcgcccacgggggccccgtccattgcctgccaggcccttggatggaccttctgagtcaggtcacacactggcaagcctggcagagcagttctccccacctgagtctgcgcccccgattctggtgaagctgatagaagccattgagcaagcagagctggacagtgaattttacagtaggccggagctgcccgcaccacggacagactggtccctgagtgacttggagcagtgggaccgcaccaccttgtacgatgctgttaagggcttcctgctggcattgcctgcagctgtggtgactcctgaggctgcatcggaggcttatcgggcgatgcgggaggttacggggcctgtggggctggtgctggaacccccaacgctgccgttgcaccaggccctcactctgcggttcctgctgcagcacctgggccgcgtggcccgcagagcaccctcaccagctacagctgtccacgcactggccagtgccttcgggccgctgctgctgcgtgcgcctccgccagggggcgagggtgatgggagtgagcctgcacctgacttccctgtgctgcttctagagaggctggtgcaggagcatgtggatgagcaagacaccgccccgccagcactgccacccaaaccctctaaggtaaagccggcacccacagccctggccaatggagggagtacaccctcgcttcaggatgcagagtggtactggggggacatttccagggaagaggtgaatgagaggctccgagacacacctgatggtaccttcttagtccgagatgcatccagcaagatccaaggagagtacacgctcaccctcaggaaaggcgggaacaacaagctaatcaaagtcttccaccgggacggtcactatggcttctcagagccccttaccttctgctccgtggtagagctcatctcccactaccgacatgagtcactggcccagtacaacgccaagctggacacgcgccttctctaccctgtgtccaagtaccagcaagaccaggtggtgaaggaggacagtgtagaggctgtgggtgcccagctcaaggtctaccaccagcagtaccaggacaagagccgcgagtatgaccagctctatgaggaatacacacgaacctcccaggagcttcagatgaagcgcacagccatagaggccttcaacgagaccatcttgatcttcgaagaacagggccagacacaggagaagtgcagcaaggagtatttggagcgcttccggcgagagggcaatgagaaggagatgcagaggatcctgctgaactcggagcgactcaagtctcgaatcgcggagatacatgaaagccgcacgaagctggagcaggatctgcgggcgcaggcctcggacaatcgagagattgacaagcgcatgaacagcctcaagcctgatctcatgcagctgcgcaagatcagggaccagtacctcgtgtggctcacccagaaaggtgcccgacagaggaagatcaacgagtggctgggaatcaagaatgagactgaggaccagtattcactgatggaggatgaggacgccctcccccaccatgaggagcgcacgtggtacgtgggcaagatcaaccgcacacaggcggaggagatgctgagtgccaaacgagacgggaccttcctcatccgggagagcagccagcggggctgttacgcatgctctgtggtggtggatggcgacacgaagcactgtgtcatctaccgcacagccactggctttggcttcgcagagccctataacctgtacggatccctgaaggagctggtattgcactaccagcacgcatcacttgtgcagcacaatgacgcgctcaccgtcaccctcgcacaccctgtgcgtgcccccgggcctggcccgccccctgcagcacgctga

SEQ ID NO: 123 - DNA, 3138 bp, rat; identical to SEQ ID NO: 113

SEQ ID NO: 124 - DNA, 1782 bp, rat; identical to SEQ ID NO: 25

SEQ ID NO: 125 - DNA, 1068 bp, rat
gtgtcctcatcagggtcacaaacctgtgaggaaaccctgaagacttgctctgtgatagcctgcggcagagacgggagagatgggcccaaaggggagaagggagaaccaggtcaagggctcaggggcttgcagggccctccagggaaactggggcctccaggaagtgtaggagcccctggaagtcaaggaccaaaaggccaaaaaggggatcgtggagacagcagagccattgaggtgaagctggcaaatatggaggcagagataaacaccctgaagtcaaaactggagctaaccaacaagttgcatgccttctccatgggtaaaaagtctgggaagaagttctttgtgaccaaccatgaaaggatgcccttttccaaagtcaaggccctgtgctcagagctccgaggcactgtggctatccccaggaatgctgaggagaacaaggccatccaagaagtggctaaaacctctgccttcctaggcatcacggacgaggtgactgaaggccaattcatgtatgtgacaggggggaggctcacctacagcaactggaaaaaggatgagcccaatgaccatggctctggggaagactgtgtcactatagtagacaacggtctgtggaatgacatctcctgccaagcttcccacacggctgtctgcgagttcccagcctgaggaaaccagtgcctccatcgtctccttggctctcagtcgcttccaaagaaaattcagttactggtttctcaagtttagtgttaagtgattcttttgatgggagagaatgtatttgcttgtggcatgaggacacgaatagaagctgaccgggaggcaccaggatctggttgagcacggagcaaaggtcacatccattttgctaggaacacagcaagaagtcaactatggaaaacctacaataaatatcccctgcccttttcaccagaggaccaaaggtggtccttatctgtgccagagtggcagctgatctcagccataaaagcacccaattccctttctccatgaattgtcactaagtggtgtcaaacgtgcctgtttgaagtcatcctcagt

SEQ ID NO: 126 - DNA, 2133 bp, rat
cgctcggccagctgccgtctacgggcttccgcgcggccaccgggcaactgcgccgcgcggctgccccactgagcgctcggcctcggggccgtgggatccgccgcgctgtctgcggtcaggaagaccgccctcccgcgtccgtgccggacgggtcagaggcggcgccgcacgcgaggccacccgcgatgctgctgtccaagttcggctccctggcgcacctctgcgggcctggcggcgtggaccacctcccagtgaagatcctacagccagccaaggcggacaaggagagcttcgagaaggtgtaccaggtgggcgccgtgctcggcagcggcggcttcggcacggtctacgcgggcagccgcatcgccgacggactcccggtggctgtgaagcacgtggtgaaggagcgggtgaccgagtggggcagtctcggcggaatggccgtgcccctggaggtggtgctgctgcgcaaggtgggcgcggcgggcggcgcgcgcggcgtcatccgcctgctggactggttcgagcggcccgacggcttcctgctggtgctggagcgacccgagccggcacaggacctcttcgacttcatcactgaacgcggcgccctggacgagcctctggctcgtcgcttcttcgcgcaggtgctcgccgctgtgcggcactgccacaattgtggggtcgtgcaccgcgacatcaaggacgagaacctgctggtggacttgcgctcgggcgagctgaagctcatcgacttcggctcgggcgcggtgctcaaggacacggtctacactgactttgatggcacccgtgtgtacagccccccagagtggatccggtatcatcgatatcacgggcggtctgccactgtgtggtctctgggtgtactgctctacgacatggtgtgtggggacattccctttgagcaggatgaggagatcttgcgcggcaggctctttttccggaggagggtctccccagagtgccagcagcttattgagtggtgtctctccctgcggccctcagagaggccctcgctggaccaaattgctgcccatccctggatgctggggacagagggcagcgttccagagaactgtgaccttcggctctgtgccctggatactgatgacggagccagtaccacttccagcagtgagagcttgtgaggaggaggaggggcctggactccacactgggggcctgggctcagcctagccagccctctcccagaatgaacattttctgcctgggatgtctcctgcaaaagcagtgacctctgacccctggtgacctttgctctcggcaccgggcctgtttcctttgctttgagtgcctttttgaacgctgctccacagggcctgggttttcttgagctcttctgtccaaagatggctgcgggctaagcaaggtcccgcctgccctgggtggatacttgaacccgagaccctaccctgctgctccatcttgcggcagccttcctgaccaagtgtgtttgacatggagcgccctgtggtgcccacctccaaccctccagtctcctggtcttcgtctgggcatgtctgcacaagcaatgcaacgctgggccactgctgcccgcctgcctccctggcaccgcacgcaacgagcgtgccacggtctcttatttatggtgtgatcaccctggagggcgcccctgccctgctggggctatttattgtttaatttatttgctgaggttacttcctccaagcaaccaccttctccaggcccctggggtgttcaggaaagccaagggtggccgttcagtccacagacggcatcctggttcctgcacctgcagtaggtccctaaccccatgtttgtgggaggaggaatttgtacagtggctaatttaaggggagtgggagaccctgtcaccctgggcactctgcgctggggagggggtttaaattattgaccttgtacagtctgcttgctggctctgaaagctggggtgggggacagagtctcaagcccttaatttattttagcaactgtgttctgtgaccctggtgtgagtaggcatcaggggtggggttgtataagttcaaaagtgtgaaatgtctggagatcatattttttatacaggtatttcaattaaatgttttggtatat

SEQ ID NO: 127 - DNA, 416 bp, rat
atctgtcagctcaactacctgggagtctcacgtcctctctgcactctggaccctgacttcaccgacatgaaaactcattactttctcctggtgatgttattttttctcttctcccagatggagctgggtgctggcattctcacaagtcttggacgcagaacagatcaataccgatgcctccaaaatggaggattctgtctccgctccagctgcccatctcataccaaactacaaggaacatgtaaaccagataagcccaactgttgcaggagttgacagtggtttgaagaatggacataaaggacagcaagggattgtaaaattagtgttttaataaatgaaatgtttttgaagtttatttacatcatctcaaaataaattttatgcctcagtttaaaaaaaaaaaaaaaaaaaaa

SEQ ID NO: 128 - DNA, 2199 bp, rat
ccggaaggagttcggcaggtctcccggaccccctttgtgaactacattttgggtagaacattttaatcaccgaaacccttctgaggaaaaaaagactcccactgccccctgcaaaaaaacaaaagcaaaaacaaaaaaaccaaaccccaaacccccaaatctcagtcttagctggtgccaccaaagaagcttttgagccatgtggacttttcttggaattgctactttcacctatttttataagaaatgcggggatgtcaccctggccaacaaggagctcctgctgtgcgtactggtgttcctgtcgctgggcctggtgctctcctaccgctgtcgccatcgaaacgggggcctccttggccgccatcagagcggctcccagttcgctgccttctcagatattctctctgctttgcctcttattggcttcttctgggccaaatcaccccctgaatcagaaaagaaagaacagctggagtccaagaggcgcagaaaagaagtcaatctgtcagagacgacgttaacgggagcagctacctcagtatcgacatcatctgtgacggacccagaagtgatcatcatagggtctggtgtacttggctctgctttggcaacagtactctctagagatggaagaacggtgacagtaatcgagagagatttaaaagagcctgacagaatacttggagagtgtctgcagcccggtggctatcgagttcttcgagagctgggccttggagatacagtagaaagtcttaatgcccatcatatacacggctacgtaattcatgactgtgaaagcaggtctgaagttcaaattccatacccggtgtcagaaaacaaccaagtacagagtggggttgctttccaccatggcaagttcatcatgagtctccggaaagcagctatggcagagcccaatgtaaagtttatagaaggtgttgtgcttcggttactagaggaagatgatgctgtgattggtgtgcaatacaaggacaaggagactggggacaccaaggagctccatgccccgctcactgttgttgccgacgggctcttctccaagttcaggaagaacctcatctccaataaagtctctgtttcctcccacttcgttggcttcattatgaaggatgcaccacagtttaaagccaatttcgcggagcttgttctggtcgatcccagtccagttctcatctaccagatttcacccagcgaaactagggtgcttgtcgatattcgaggagaattgccaagaaacttaagagaatacatgacagaacaaatttacccacagatacctgatcacttgaaggaatcatttctggaggcctgtcagaatgctcgtctgcggaccatgccagcaagcttccttcctccttcctcagtgaacaaacgaggcgtcctacttctgggagatgcgtataacctgaggcatcctcttactggtggaggaatgacagtcgctttaaaagatataaaaatatggagacaactgttaaaagatattcctgacctttatgatgatgccgctattttccaggccaaaaagtcattcttttggtcaagaaaaaggagccattcctttgttgtgaacgtgctggctcaggcgttgtatgaactattttctgctacagatgattccttgcgtcagctccgaaaagcttgctttctttattttaaacttggtggagaatgtttgactggtcctgttgggttgctttctatattgtctcctgaccctctcctattgattcgacacttcttctccgttgcagtctatgccacgtatttctgcttcaagtcagagccatgggctacaaaacctcgggctcttttcagtagtggtgctatactgtacaaagcgtgctctataatatttcctctcatctattcagaaatgaagtatctggttcactgaaagggaaaccacatggaagtcattgggacttgaggaggatgtacatagcctaggactgtgtgtgtgacttctgcagtggtgactcaaggaccaagcttgtgtataagcatgtaaatatatgccttaattcacaattgagaatgaagggtcaataagctagatgtttaaaagaatgattgtttccacaaattaatgttaacactcaagtgtttggatttcagtattggggtgattcaattggggacaatgccaaataaaatgaaggagtggaactcctt

SEQ ID NO: 129 - DNA, 642 bp, rat
aaggccaagaaggccatcactgacgccgccatgatggcggaggagctgaagaaggagcaggacaccagcgcccatctggagcggatgaagaagaacatggagcagacggtgaaggacctgcaactgcgtctggacgaggctgagcagctggcgctgaagggcggcaagaagcagatccagaaactggaggccagagtgcgtgaactggagggtgaggtagagagtgagcagaagcggaatgttgaggctgtcaaagggcttcgaaaacacgagaggcgagtgaaggagcttacttaccagacagaagaagaccgaaaaaatatcctcaggcttcaagatttggtggataaactccaagcaaaagtaaaatcttacaagagacaagctgaggaggctgaggaacaatccaacacaaatctatccaagttccgcaagctgcagcatgagctggaggaagccgaggagcgggctgacatcgccgagtcccaggtcaacaagctgcgggtgaagagccgcgaggttcacactaaagtcataagtgaagagtaaggcagctctgatgctgtagaatgaccgaagagaggcacaaaatgtgaagcctttggtcatgtccccatgtgattctatttaatcctattgtaa

SEQ ID NO: 130 - DNA, 4831 bp, rat
agcccgctccccgagcagccttagccatccctaactaatccaactgcttcccagtctgcgggtgctgggctcggtgctgagaagaggctctggctcttggctattgtcaggtcaaacactaagactgtgtccatgttagaactcatagaagttaatggaacccctggcagtcagctctccactccgcgctccggcaagtcaccaagtccatcgcccaccagcccaggaagcctgcggaagcagagggacctgtaccgccctctctcgtcggatgatttggactcagtaggagactcagtgtaaaagacacagtggagcgatgtgtatggtttgtgatgggatcaaggtttcccatttcctaagcaagcatctaacagcaaaatacacaaaagagttttgcataagcaattaaattatacaaaagcaagagtgcagacattttctactcggcggtattctttgaaagaaaaaaaaacttttttaaagcatctcctccatttgatgtaaccgaggagagtttgaatacaatatttgttcatcactgaggattttatgactaaggtctggttccagataaatttcatatatgactccaatattaagtacaagaatcaccctaacgatccagcattatggagtcaccatttctataaatgagcctgctttttaatcagtaagtagatatataaatacaatttttctgtacttagtatcttttacctttttagtttaaatttttttaaaaaaatcagacagctaattagttatttcattgcaaaataacataaaagaatctcttcaggattttttatttgagtgaatacgtctgaaggggagtggaggaactccgtaagagacgtctcccagagaccaacattaggcagcgagaacgtttctggttttttttttttttttttttttgtttttgttttttgccacatggattttcttttcccagatttttataaaaatagtttcaactacatggaaacatgaataacttggcattattattaattttataatggttccctacagcaacaacagtatatatatctttttcaagtgtgtaaagttttttgacctaaaacaaatgggacttgtactgtttttcaaaaaataaactcagtttgagaattggaattcttctacacagagcttgtacgttgggcctccaggtagctaaactccattctgatcatcctgcatcccgttgtttgggatatcttcacatgcaaaactccttttgtgtcaaaccgagtgtgtctatgattataacccactgttaaaattaacctactaattcttctcctttagtcctctactttcaaaagcgtgagtcagctttgcttaaatgtaaaacagttattttttaaatctagatgttagaaatcaatgtgtacggtgtattgtatttagaccatacccgtgaccgtttctttttactagctcaaacactaacaatttaagacttacaaagcatgggttttatattcgccaggcttgacatatctcagtagggtgacagatttaaaatgtatggtgccatttggagccttttacttgagatttctttcaaatttcacttgaaaacattttgaaaatgcctgattcaagatggagaggagttgccttgtcatacggtctcaaatgttattgatttatttctctcagtagactgttcgactagcaatttttcccatctggtttatcgttacctgtgctagcatctcacttgacaagtgaataaaatattccaactgaaaaaagaaaaataagacctccaggcaacctaccagcatttgaaaagttagccgagtgataattagtgcctcattaccctgcctgttagagaggagagggcacttctttggcgtgttatttgagaactgcagactgatccctccatcttgaaagcacagagaatgatcatacctgttccagacttcggattttaaaactgtttccaatagacacgaacagagactcctgctgagatgaaagggccgctttgtctttagctgaaacagtaaacatctgggaggatgctgtgctgcctgttggagtgttacgtctttgtaagatgcattgcttaatatagtccaacccgtaaaagattagtacagatttgactaacctgtcaaaaaatgcaatgaaagcagtgggtcagatggtccagaacaaaacataaattccagtaatttcaactcccctatgaagtcaatcttatggacgactactgctaggagaaacctaataaatgttatctgctataaaaatcgtggctttgtttagacacagcatagagtagacttggactaattgccagtaggtattgtggccaactttccattcaagcagttccagagagatgcaatcccatggcatttcatcctggaacatacgatttttattaaaggattgttcaagggccatatatctcatttacttttgaaactaaagtccctctgagattgaaacaacacaccctgagatctctttctatgcacggaataattctattatccaaaagcagagtttttgaacatccaagcagcccaccaggtcattagtaaagacccaatgggcaattagcagtcactcaagacgtggctgcttttagaatccttctaacatcattagtcgctgaactctaaaaatgaccttctgaggagagagctccagccaacaaaagccacatgcttttctctcactgataaagcctctgctgtgttgacctttcaggcctttgcatgtatggttacatttttttagacatacctagaaagaaagatgctataaagagtcccctgctttcagcattttatgagctaaaaccctagtgatgcacaaaatgtgttgctctgcgtgaactccgaagccatgtgggaaagtcattgtcatttcagcagaaggtctgtactcttgtaggtttctaaaccggaagtttgtgctccacctatatgtacgcatgcctgcaatgcacacatgaggtcaccttaacatgtcaagatctgatcccgttgtctgccaaccccagagcagctctgacacctatgctcccctgccaagcagcgagggcactcgccctccccttccttgcagccgcaccgagctgtacttttgtttccatttaaaagaactgaattccaaaagcctcgttttaaaaaagcaattgggaatgaaaatacataagaataatcctaaaagataaatccatatatttaacctgttgaactactaggttttttttttcttttcctggtggccatatatctatacaggtgtgtaggtgtgcctacataaatatctgtgtttgtatatagaacatgaagaataaaggatgatatttgtgatatggtcttataagttactggctcctgtagaattaactgtgaagctttatgtgataaagttgtgacgtatgtattagttggcacatgtttaagctcaaaacaagttggctaaattatcatgaagcagtaccaactgttcacgggtacgaatttatccaagaccgattggaatccagacaaacaaaaaaattgaagtccaagcaaatccaatcttacagtgattgataaatgtaaatactcattgatgttttcactgtaaattcttgatgctcagccagtaatctgacagaatgcagtgacactttcctgttgtgtgtgtactgatgactacagcgattatcaatgggaaattcaccaaacaaactgatttctagacttgtggacagttgagtgttgtgctgaaataaaagtagaaaaggtcaaagtaaattcggtttgaagccttgttatgaagccagacaacatgtaaggccatgctgtgtgtcctttttataaactgttttggagacacttgctgtgtgtgtgcatgtgtgtctacatgagtgtatacacacttgaaaatgcttattgactcaagttcactgtctgtatacatctgtgcctatctgcattggtctggccagcgcctctaactgtgcatggtagtgacagccctgtgtgattggatgaacccacagaaaaatagtgtggaaatcagagctgcgtcaaactcattataacaattgcctgatatagcatattaaattgtcagctgaaaaacgtttgtaatgttgtgcctgtaacatgtgtagggaaaactggaaaatctgaggccctcactataattttaagggtgcatgacatgtggtgtctttaaagatgtatcttattgtaataaaaggtgatggataaattctgaggtagcgtaagtgaagcatgaaacgctaggtgtttgtattatatatggccacacaatatttttgaaggcagggtagtaaatgtttgaaggttaataggcaaagaatatggaagttaattttactgtgatgtgtttttgaggtgtttttacacattgccagacaaggaacttagttcctgtttcccccctgtggactctttgaaacactatgaatgttacaaagttggattttctttataaaggtcgcaaaccatttgcagttggagttgcttggatgtatagtctcctctttggggaaaaaaaccactttggtattaaaatggtttaagcactaatacattgggaaatacgtcgtctgaggccatctgcagacatctgtagagatgagaactaatgaaatgtgttactgaactacccagttttgatagcttccatgcctctctgctgtagtctcctcgaaaatgctgtaccttgtgtttcacatgcaaccatgttactctctcccgaacttacctttgtgacacttagcagcttagccaaaccacgtaataaacaggaagaactgcaaaaaaaaaaa

SEQ ID NO: 131 - DNA, 638 bp, rat
gggacacatgagttctttattgagaaccatccctgggggtggaggccgagatgggtagcgcgatggtctctgcgcagatcctcagcatcccttggctcccgggcgtgcgctctggatcagagtcggatcagtgcaaaccttctggcccgtccagccgctcctcctccagccctgtgttgccctcttccccgtccaaagtcacctcgtcatcctcttcatccccagaggcgcccggctggaagtcgatggtccgcaacatttccgccacgtgctccacgatcacagagaattgctccatgctctcatagcctggctccggccgtccagccagctccaccttcgacattgccccgaccttgttgatcagctccttggcctgctggaggtagagagccatctgcggctcctccatggactggatggcggactccaccagcttagaggaggcctccaagtggtctccgtactggcggatgaggctacgcacgcgctgcagcttctcctcttgcacccgagccagcgcttgaagcaactcgcccttgcgctcctccaaaaccgcgcacagggtctcgaacttctggtttaacagttgtttctgtctgccgctgttgtcctcaatggtctggcacacctcctcc

SEQ ID NO: 132 - DNA, 2142 bp, rat
ggggccgccgtcgctgtcctagccgccgccgctgccgccgccgccgctgccgtcttcaccgcgggagaaggagcacgagacaggacgcccctgagtgaacgccaccatcctgccgacagctccgcccgggctgcttcctttccgcccaggtccccgtcccctcccccctcaggtgccatccgcctccatccgcgccctcgatccccccatccccaggtgagggggctgagccccggtcgcggaggcccggacgagcccggcagggtcaccatttgcagcgcgacatggcaggagctggaggagggaatgatattcaatggtgtttttctcaggtgaaaggagcagttgatgatgacgtagcagaagcagatataatttctacagtagagtttaatcattctggagaattactagccacaggagataaaggtgggagagtcgtcatctttcaacaagagcaggagaacaaaatccagtctcatagcagaggagaatacaatgtttacagcaccttccagagccatgagccagaatttgactacttgaaaagcttagaaatagaagagaagatcaacaaaattaggtggttaccccagaaaaatgctgcccagtttttattgtctaccaatgataaaacaataaaattatggaaaatcagtgaaagagacaaaagaccagaaggctataacttgaaagaggaagatggaaggtatagagaccctactacagtcactacactacgagtgccggtgtttaggcccatggatctaatggtggaggccagtccgcggagaatatttgccaacgcccatacctaccacatcaactccatttctatcaatagtgattatgaaacctacttatcagcagatgatttgcgaattaatctctggcatctggaaattacagacaggagttttaatattgtggacattaagcctgccaatatggaggagctcacggaggtgatcacagccgcagagttccatcccaacagctgtaacacgtttgtgtacagcagcagtaaagggaccattcgcttatgtgacatgagggcatctgcactctgtgacaggcattctaaactgtttgaagaacccgaagatcccagcaacaggtcgtttttttctgaaatcatctcctcaatttctgatgtaaaattcagccacagtggtcgctatatgatgactagagactatttgtcagtcaaagtttgggacttgaatatggaaaacaggcccgtggagacataccaggtacacgaatacctcagaagtaaactttgctcactgtatgaaaacgactgcatatttgacaaatttgaatgttgttggaatgggtctgacagtgttgtcatgactggatcctacaataatttcttcagaatgttcgacaggaacacaaagcgggatataactctagaagcatcgcgagaaaacaataagcctcgtacagttttgaaaccacgcaaagtctgtgcaagtggcaagcgaaagaaagatgaaataagtgttgacagtctagacttcaacaagaaaatccttcatacagcctggcatcccaaggaaaacatcattgctgtagcgactacaaacaatctgtatatatttcaagacaaagtgaattaggctggcattctctgcagaggagccacttcctgcttagtgagatagttgaatctagcattcgtacctataagagagcggtccattgtggcgtccctttccagtgtttgacagtgtgccattcaacaacacatttgatagccacatggagaaagctgtgcggatgcatcccgggctgtttccatgtctgctagccatttagggaagggaagggcacttttaatttaatgacttcttgcaccatcttgcctggtggactggactggactgtgtcagcattgatgtactccactttttatgccttccattgtgatgacgtcaaacacagtgaacgccttcagtcatgctatggaatttgtgtatcctcattactgtatcatttgtgggagtgcaagggtaatcatttattgaactgcaagagcaagatatttgtgcggaatgatcatgggtggggccaagagaaatttaagaaagcttttaattctcgatgtgttgtcctgggtaactagggaagatg

SEQ ID NO: 133 - DNA, 678 bp, rat
atcggctcccgcggcgtgggcaagaccagcctgatggagcgcttcaccgacgacacgttctgcgaggcctgcaagtccaccgtgggtgttgactttaaaatcaagactgtagaactaagagggaagaaaattagattacagatctgggacacagcagggcaggagcgattcaacagcattacctcagcctattacagaagtgccaaggggatcatactcgtgtatgacatcaccaagaaagagacgttcgatgacttgccaaagtggatgaagatgatcgataagtatgcttcagaagacgctgagcttctcctggctggaaataagctggactgtgaaacagacagagaaatctccaggcagcaaggagaaaagtttgcacagcagataaccgggatgcggttgtccgaaccgagtgccaaggacaatttcaacgtggatgagatctttctgaaactcgttgatgatattttgaaaaagatgcctctcgatgttttgagaagcgagttatccaatagcatcctctctctacaaccagagcctgagatcccaccagagctgcctccacccagaccacacgtccgatgctgttgatttgatactttggagatggtgcaagccattgctagaaggggaaagcattcttgctctgcactacaatcacgtgacaacttcctt

SEQ ID NO: 134 - DNA, 1947 bp, rat
taagctaggggccaggacaccccaggacgcgactgctttcttcaccacacctctgacaggacaggacagggagggaaggtagaggacagcaggtgtgcattccaaccgtcagaaccattgtcattgtactattggggttcaggagtgacagaaagttaagacgactcttcaggcttgggttgagcgagaagcaggacccagaactgggacatggagctactatcgccgccactccgggacacagacttgctaggccccgacggctctctctgctcctttgcgacacgcgatgacttctatgatgatccgtgtttcgactcaccagacctgcgcttttttgaggacctggacccgcgcctggtgcacgtgggagccctcctgaagccggaggagcacgcacacttccccactacggtgcacccaggcccaggcgctcgcgaggatgagcatgtgcgcgcgcccagcgggcaccaccaggcgggtcgctgcttgctgtgggcctgcaaggcgtgcaagcgcaagaccactaacgctgatcgccgcaaggcagccaccatgcgtgagcggcgccgcctgagcaaagtgaacgaggccttcgagacccttaagcgctgcacgtccagcaacccgaaccagcggctacccaaggtggagatcctgcgcaacgccatccgctacattgaaggtctgcaggctctgctgcgcgaccaggacgccgctccccctggcgccgctgccttctacgcacctggcccgctgcccccaggccgtggcagtgagcactacagcggcgactcagacgcgtccagcccgcgctccaactgctctgatggcatgatggattacagcggccccccaagcggcccccggcggcagaatggctacgacgccgcctactacagtgaggcgtccagcgagcccagaccagggaagagtgcggccgtgtcgagcctcgactgcctgtccagcatagtggagcgcatctccacagacagccccgctgcgccttcgctgcttttgccagatgcgccaccagagtcgcctccgggtccgccagaggagacatcctcaagcgatgcagaacaggggacccagaccccgtctcccgactccacccctcagtgtcctgcaggctcaaagcccaatccgatttaccaggtgctctgagaggttggctgcagcagcagagggcgcccggtctgcactcatggggatggtgcccctgggtccttcatgcccccccaaaaatgaagcttaaatgacactcctcccaattgtcctttcaaagccattcttccagagggaagggaagagcagaagtttgttgtcctacatccggccccaaggaaaagacgaagtctggttgttgttgctgctgctgttgttgttgttgttgttgttgttgttgtagtcatggggttttttgtttgtttgttttgtttttcatgcgactcacagcgaaggccacttgctgtccctcactgggccagagctgatctttgagtggccaggacctctttcctttcctcacagtccctagcacagggtgagcctcgcacacttaagccctgccttccacatccctgttgtttgtggagacactgttcccactttctggagcccccccccgacacccactctttcccacagcttgcgaggccactcagatctcgggtgtaacaggtgtaacaaccataccccactctctcccttcccatgttcaggaccacttattttttttatattaagacttttgtaatctattcgtgtaaataagagttgcttggccagagctggagccccgtgggctgtatttatctccgaggcatgctgtgtagtgcaacaaaatctttgtatgtttattcctcaagcgggcgaagcctcgaggctcattcgctcaggtgttggaaataaagatgctaatttatacaacagtggctctggctt

SEQ ID NO: 135 - DNA, 3965 bp, rat
cggcacgagcggggagccagagcgcgcgggcgccggcaggctggccgagctccgtttccacagtcgcccttgatggcggcgcaggcgaggcagccgtggcacggagcggcagccacgcgctagagagtccgctcggccccgcccggccggcccgcccgtgccctgccctgcccgcctctctcctcgcgccctccggcagacgtcggcgccccggctcagtccctcgccgcgtgcagctccgccggctccgggccggcagggagggcactgatcttcgatcgcgaagatggctgctggctgcctgctggccttgactctgacacttttccaatcttggctgatcggcccctcgagcgaggagcccttcccttcgcccgtcactatcaagtcatgggtggataaaatgcaggaagaccttgtcacactggcaaagacagcaagtggagtgactcagcttgctgacatttatgaaaaataccaagatttgtatactgtggagccaaataatgcacgccaactggttgaaattgcagctagagacattgagaaacttctgagcaacagatctaaagccctggtgcgcctggctatggaagcagagaaagtccaagccgcccaccaatggagggaagattttgcaagcaacgaagttgtctactacaacgctaaagacgatcttgatcctgaaagaaatgagagtgagtcaggcagccaacggattaaacctgttttcatcgaagacgctaattttggacgccagatatcctatcaacatgcagcggtccatattcccacggacatctatgagggctcaaccatagtgttaaacgaactcaactggacaagtgccttagatgaagttttcaaaagaaatcgagatgaagaccctacattgctgtggcaagtgtttggcagcgccaccggcctggcccgatattatccagcttctccgtgggtggataacagcagaactccaaacaagatcgatctctacgatgtacgcagaagaccatggtacatccagggagctgcatcccccaaagacatgctcattctggtggacgtgagtggaagtgtgagcggattgactctgaaactcatccggacatctgtctctgagatgttagaaaccctttccgatgatgatttcgtgaatgtagcttcatttaacagcaatgctcaggatgtgagttgtttccagcacctggttcaagcgaatgtaaggaacaagaaggtgctgaaggatgcggtgaataacatcacagcaaaggggataacagattacaagaaaggctttagcttcgcgtttgaacagctacttaattataatgtttccagagccaattgtaataagatcatcatgttattcacggatggaggagaagagagagcccaggagatatttgccaagtacaataaagacaaaaaagtccgcgtgtttacattttctgttggtcaacataattatgacagaggacctattcagtggatggcttgtgaaaacaaaggttattattatgagattccctctattggtgcaataagaatcaatactcaggaatatctagatgttctgggaagaccaatggttttagccggggacaaagcaaagcaagtccagtggacaaatgtgtatttggatgctctggagctgggacttgtcattactggaactctaccggtcttcaacgtcactggccagtctgaaaataagactaacttgaagaaccagttgattcttggtgtgatgggcgttgatgtgtctctggaagatattaagagattgacaccacgttttacactgtgccccaacggttactattttgcaatcgatcctaatggttatgtcttactgcatccaaatcttcagccaaagaaccccaaatctcaggagccggtcacactggattttctcgatgctgagttagagaatgatattaaagtggagattcgaaataaaatgatagacggagaaagtggagaaaaaacattcagaactctggtcaaatctcaagatgagagatatattgacaaaggaaatcgaacatacacatggacacctgtcaatggcacagattacagtttggccttggtattgccaacctacagtttttactatataaaagccaaaatagaagagacaataactcaggccagatcaaaaaaggggaaaatgaaggattcagaaaccctgaagccagacaattttgaagaatctggctacactttcatagcaccaagggaatactgcaatgacctgaaaccttcagataataacactgaatttcttttaaatttcaatgaatttattgataggaaaactccaaacaacccttcctgtaatacagatttgattaatagaatcttgctggatgcgggttttacaaatgaacttgtccaaaattattggagtaaacagaaaaatatcaaaggagtgaaggcacgctttgtggtgactgatggcggaattacaagagtttaccccaaagaggctggagaaaactggcaagagaacccagagacgtatgaggacagcttctacaaacggagcctagataacgataactacgttttcactgcgccctacttcaacaaaagtggacctggtgcctatgaatctggaattatggtaagcaaagctgtagaactgtacatccaaggaaaacttcttaagcctgcagttgtgggaattaaaattgacgtaaactcctggatagaaaattttaccaaaacttcaatcagggatccgtgtgctggtccagtttgtgactgcaaaagaaacagtgatgtaatggactgtgtcattctagatgatggtggatttcttctgatggccaatcatgatgattacactaatcagattggacgtttttttggagagattgacccgagcatgatgagacacctggttaatatatcactttatgcattcaataaatcatatgactatcagtctgtgtgtgatccaggggcagcaccaaagcaaggagcaggacatcgctcagcctatgtgccatcaattacagacatactccagattggctggtgggccactgctgccgcctggtctattctccagcagctactcttgagtttgacatttccacggctccttgaggcagttgaaatggaagaggatgacttcacagcttccctgtctaagcagagctgcatcacagaacaaactcagtacttcttcaagaacgatactaaatcattcagtggtttactggactgtggaaactgttccaggatctttcatgttgagaagcttatgaacaccaacctagtgttcataatggtggagagcaagggaacatgtccgtgtgacacgcggctgctcatgcaagcagaacagacttctgatggtccagatccttgcgacatggttaagcagcccagataccgaaaaggacctgatgtctgctttgataacaatgtgctggaggattataccgactgtggtggtgtttctggattaaacccttccttatggtctatctttggactccaatttatactcctttggctggtatctggcagcagacactatctatggtgaccctctaaacccatgatctgcaacttaattccatgccctgccaaaacatgagccctcagttacattaaaatagagcccgttgaagaagctccacagaaccttagctgggcctctaccctgatgtaactgtgaggcttagattcctgaccatcgctggctgcatgtcagggtgttggaaactgaaactcgtgtgaacatgctgcatcatctgtgtccaacatcaaagcaaagctctactcattctctgtgggaggtttgggagttcgctgttgcactgttggagattacgtggaaaaggctcccccacgcaggccttatgaaaagaagcagtcttgactttgacctagcatttcaacctgctgcagttttaccaagaagaagaaggaaaaaaaaaaaaaaaaaa

SEQ ID NO: 136 - DNA, 1898 bp, rat
taagtacctgagggtaaggtgttgttctctctcatatggtcatatagtcttctgagtagtctaaacctcattatatgacccaaactggctttgaactctttttttttttttttttttttttttggttctttttttcggagctggggaccgaacccagggccttgcgcttcctaggcaagcgctcactgagctaaatccccaaccccggctttgaactcttgatcttgttgcctcaccacttcgaagggctggaaaaataagtgacctcacctagctagaatcagagatgtaagaagtgctttgccagagttggaaataggaagctgcgaggctggttattccaggatcttaataacaacatcagccagaagtacttgaagtgctacaaacaggaagtagatagccgaattcccagacttttggtctggatgtactgacaccgcccaccgctcggtgggctgatggccctcgcgccaccctttcattggccagtcgtcacaaggcccatactcacacgaggtcattcagccaatcagcgaactcggcctcgcccatcatgaggcgcaagtgtcttacttgcggcttggtccgcggcaggctgggagtcgtagtattatatttgggttctgcctactgagccgggagtctgggaactacaactcccagagtgctgagcggatgcacgctctgcttttaggtgtaagccgcaaacatcttggaccccgggagaatccgcgttgaagcacagagcatttagctcctctgtcagaatgaatggggaccagaaactggatgttcataaccaagaaaagcagaatttcatccagcacttctcccagattgtcaaggtgctgactgaggatgaactgggacacccagagaagggagatgctattacccggatcaaagaggtcctggagtacaacactgtaggaggcaagtacaatcggggtctgacggtggtacagaccttccaggaactggtggaaccaaggaaacaggatgctgagagcctacagcgggccctgacggtgggctggtgtgtagaactgctccaggctttcttcctcgtgttagatgacatcatggactcttcctacactcgccgggggcagatctgctggtatcagaagccgggcataggcttggatgccatcaacgatgctctgcttctggaagccgctatctaccgcctgcttaagttctactgcagggagcagccctactacctcaacctgctggagctctttctacagagttcctatcagactgagatcgggcagactctcgacctcatcacagcaccccagggccaagtggatcttggtagatacactgaaaagaggtacaaatctatcgtcaagtacaagacagctttctactctttctacctgcctatcgcggctgccatgtacatggctggaattgatggggagaaggaacacgctaatgccctgaagatcctgctggagatgggcgagttcttccagaaccaggacgactaccttgatctctttggagaccccagtgtgaccggaaaggtcggcactgacatccaggacaacaaatgcagctggctggtggttcagtgtctgctacgagccactcctcagcagcgccagatcttagaggagaattatgggcagaaggacccagaaaaagtggcgcgggtgaaagcactgtacgaggagctggatctgcggagtgtgttcttcaagtacgaggaagacagttacaaccgcctcaagagtctcatagagcagtgctccgcgcccctgcccccatccatcttcctggaactagcaaacaagatctacaagcggagaaagtaacctcgaattgtagaggctgcgagggaggggtctcaataaattattgttcaacaaaaaaaaaaaaaa

SEQ ID NO: 137 - DNA, 541 bp, rat
  misc_feature (388)..(388): n is a, c, g, or t
  misc_feature (491)..(491): n is a, c, g, or t
cgtcgtctcaggccttgactgcgtacttgcgcagtgggtacagccgctccttccgctgctgcttcttggtcttcagcttctcttcatgcttggtgagccggcggcgcatggctcttgtcttcttgggtcgcaggtccaggggcttgtacttctttcccttgtagaatttcctgaggttttccttttgagtctgattaatgacagtgaggacacgggcgatgtatttgcgtacgactcgtatcttgaagataaaaagtccatgaagaggttatgaagctctgtgcagagtccatcatgtcgctccagaaggacctcaccagagtcagagggaagaggaggtgcatccttggcatcagggacatgagttgttcttgtctcagttcagcanatggcaactggtcctggcagccgagatggcacgcatactgctcgtcaggctgggaatacgcttctgtgcacgcagattcacattccagtttggttcgatttanatcaatttcatcatccacgaactggcaaattgaaaacagcctgcagcctc

SEQ ID NO: 138 - DNA, 15500 bp, rat
ccagggaaccggcttaggaaacaatcgaacgcaatctgcttcccttcctgagaaaagcctggtgcttgccggaagtacctccaatccaacagccctccttctgcgtcatgtacctgtgtgcacaggagtggctcaccctggggctcaatgttcctctgcttttcctatcacttctggaggtatttccactgtccagcagatagctcagaactagcctacgacccaccagttgtcatgaatgccgacaccttgagctactgtcagtacggaggcctggtgtaagctggccttctatctcctctccttcttctactacctgtactgcatgatttacaccttagtgagctcctaactcagaccctgctggtggagagaccaaggctgggaaccactgcggttgtggctagcggagaccaggtggggatgatgaagagacccggctggcagagactgaatggaaggaacggagttgcaccacggacagggccgtgttacccatgcatatgcgtttctgccttcggctttcacctcccacatgggttgcagagcccccctgagcatgggggtggcagcctgtagctgatgaaacattcaacctccggagatgcggttactttcttcatccacttcttcagtgggcagcagaacggtacgagttcacgaagagctcgaccagagggtagaaatgaggccagaagccgggaaggtgtcgatcaaggaacagaatggctctgggtcagtgccagatcttcagggatggctgagacccacaaggacaccatgggctgcccaagactcttgtcatattttttccagagctgtggccacatgctttgctcagtgcaaagctaaaagccgcagggactgccctgagccacctctcatgtcacttttatgctttgtctgggagcctgagcattggcttcctgagctgggtgtgggcagcaagtcctgtccagtgggaactggggaggggagaaaatggatttctaaaatgtttgcaacatgtcccaggtgtgagttcttcaccatcccaagatgtattctgctgctgtaccaaaaatgcatcagtcagtacatgcctgttagctgtctggcatgagccaaagcctaaaaaaaaaaaaaaaacaccctcattacggggtgaagtccagcggggccggcgggagcggtggcctttagggcggagccgctccgctgtccgcagtcggccgcgggctagcggacacagcgtcttctgtcgccggtttctttcgctcactgctccctcgttccggaggtagctcttctcggctctctctctctctcttctctatctctctcccttccgcggatccgccatgtcggagaccggcggcggtgaggacgggtcggccggcctggaggtgtccgcggtgcagaatgtggcggacgtgtcggtgctgcagaagcaccttcgtaagctggttccgctgctgctggaggacggcggcgacgcgccggctgcgctggaggcggcgctggaggagaagagcgccctggagcagatgcgcaagttcctgtcagacccgcaggtccacacggtcctggtggagcgctccaccctcaaagaggacgttggtgatgaaggagaagaggagaaagaattcatttcctataacatcaacatagacattcattacggggtgaagtccaatagcttggcgttcatcaagcgagcccctgtgattgatgcagacaagccggtgtcttcccagctccgagtcctcacgctgagcgaagactcgccctacgagaccctgcactccttcatcagcaatgcagtggctcctttctttaagtcctacatcagagagtctggcaaagcagacagggatggagataagatggctccttcggttgagaaaaagattgcagagcttgagatggggctccttcacctgcagcagaacattgagatcccggagatcagcttgccaatccaccccattatcaccaacgtcgctaagcagtgctacgagcgtggagaaaagcccaaagttacagatttcggtgataaggttgaagacccaacctttcttaaccagttacagtctggagttaatcggtggatccgagaaattcaaaaggtgaccaagcttgaccgagatccagcatcaggaactgccttgcaggaaatcagcttttggctaaacttggagcgtgcattgtaccgcatccaggagaagcgggagagcccagaggtgctcctgactctggacatcttgaagcatggcaaacgtttccatgccactgtcagttttgacacagacacaggtcttaagcaggcgttggaaacggtgaatgactacaatcctctgatgaaagacttccccctgaatgacttgctgtctgccactgagctggacaagataaggcaggcacttgttgcaattttcacacatctgagaaagatccgaaacacaaaataccccattcagcgggccctgcgacttgtggaggcaatttccagagacttgagttctcagttgctcaaagtcttgggcacgaggaagttgatgcatgtagcgtatgaagagtttgaaaaggtcatggtggcttgcttcgaagtcttccagacgtgggatgatgagtatgagaaactccaagtgctgctgagggacatcgtcaagaggaagagggaggagaacctgaagatggtgtggcgcatcaaccctgctcacaggaagctgcaggcccgcctggaccagatgaggaagttccgccgccagcacgagcagctgagagctgtcattgtcagagtcctgcgcccacaggtcacagcagttgcacagcagaaccaaggagaggcacctgaaccccaagacatgaaagtggccgaggtcctctttgatgctgcagatgccaacgccatcgaggaggtgaacctggcctatgagaacgtcaaggaagtagatgggctggatgtttccaaagaagggacggaggcttgggaggctgcaatgaagagatacgatgagaggatcgaccgcgtggagacccgcatcactgcccgcctccgagatcagctcggcacagccaagaatgccaatgagatgttcaggattttctccaggttcaacgcactgttcgtccgcccacacatccgaggggccattcgtgaataccagacccagctgatccagcgtgtaaaagatgacattgagtctctgcacgacaagtttaaggtccagtacccacaaagccaagcttgtaaaatgagtcatgtccgcgacttgccccctgtgtcagggtctatcatctgggctaaacagattgaccgacagctcactgcctacatgaagcgagtggaagacgtcctgggcaagggttgggagaaccacgtggaagggcagaagctgaagcaggatggtgacagctttcgaatgaagctcaacacccaggaaatcttcgatgactgggcgaggaaggttcagcaacgcaaccttggtgtttccgggcgcatcttcaccattgagagcgctcgcgtgcggggccgctctggaaacgtcctcaagctaaaggtgaacttccttccagagatcataacactctccaaagaagtccggaacctcaagtggcttggcttccgcgtgccacttgcaattgtgaacaaggctcaccaagccaaccagctctacccatttgccatctcgctgattgaaagcgtccgcacttacgaacgtacctgtgagaaggtggaggagcgcaataccatttcactgctagtggccggcctgaagaaggaggtgcaagccttgatcgcagaaggcatcgcgttggtgtgggagtcctacaaactcgacccctatgtgcagcgcctggcagagacggttttcaacttccaagagaaggtggacgacctcctgattatcgaggagaagatagacctggaagtccgttccttggaaacctgcatgtatgatcacaagacattctctgaaatcttgaacagagtgcagaaagcagtggacgacctcaacctgcactcctactccaacctgcccatctgggtcaacaagctggacatggagattgaaaggatactgggtgtccgcctgcaagctggccttcgagcttggacccaggttctcctcggacaagctgaagataaagcagaggtagacatggacaccgatgctccacaagttagtcacaagcctggtggagagcccaagatcaaaaacgttgttcatgagctaagaataacaaatcaggtaatctatttgaatccacccatcgaagagtgcaggtacaagctataccaggagatgtttgcttggaagatgattgtgctgtccctgcccaggatccagagtcagaggtaccaggtgggagtgcattatgagttgaccgaggaagagaagttctatcggaatgccttgacacgcagtcgtgacggccctgtcgcactggaagagtcctactcggcggtcatgggcattgtgactgaagtcgagcagtatgttaaggtttggcttcagtaccagtgtctgtgggacatgcaggcagagaacatttacaacaggctgggggaggacctcagcaagtggcaagcgctcctggtgcagatcaggagagcccgagggaccttcgacaatgccgagaccaagaaggagtttggaccagtggtgatagattacggcaaggtccagtccaaggtgaacttgaagtatgactcctggcataaggaggttctcagcaaatttgggcagatgctgggctcaaacatgacagaattccattcccagatctcaaagtctcgccaagagctggagcagcactccgttgacacagccagcacctctgacgcggtgaccttcatcacctatgtgcagtctctgaaacggaagatcaagcagttcgagaagcaagttgaactctaccgcaatggtcagcgtctgctggaaaaacaaaggttccagttcccaccttcttggctttacattgacaacatcgagggtgagtggggggccttcaatgacatcatgcgtcggaaggactctgccattcagcaacaggttgcaaacctgcaaatgaagatcgtgcaggaggaccgagctgtggaaagccggactaccgatctgttgacagactgggagaagaccaaacctgtcacaggcaacctacgtcctgaggaggctcttcaggccctcaccatctatgaagggaagttcggccgactgaaggatgacagggagaagtgtgccaaggccaaggaggcactggagctcacagacacggggctcctcagcggcagtgaagaacgagtccaggtggccttggaggagttacaagacctcaagggggtgtggtcagagctttctaaggtctgggaacaaattgatcaaatgaaggagcagccatgggtctcagttcagcctcgtaagcttcgacaaaacctagacggcctcctgaaccagctgaagaacttccctgcaaggcttcggcagtacgcctcctatgagtttgttcagaggctgctgaaaggctacatgaagataaacatgttggtaattgaattgaaatcggaagcacttaaagaccggcactggaagcagctgatgaagaggcttcacgttaattgggtggtttctgagctgaccctgggccagatctgggatgttgaccttcagaagaacgaagccattgtcaaggatgtgctgctagtggcacaaggagagatggctttggaagaatttttgaagcagatacgggaagtgtggaacacatacgaactagacttggtcaactatcagaacaagtgccgtctgatccgaggctgggatgacctcttcaacaaggtcaaggagcacatcaacagcgtctctgccatgaagctctctccgtattacaaggtgtttgaagaagatgccctgagctgggaggacaagctgaaccgaatcatggctctctttgacgtgtggattgatgtgcagaggcgctgggtctacttggaaggcatcttcacaggcagtgcagacatcaaacatctgctgcctgtggaaacccagcgctttcagagtatcagcacggagtttttggctctgatgaaaaaggtctccaagtctccacttgtgatggatgttctgaacatacagggagtccagaggtctctggaaaggttggccgacctgcttggaaagatccagaaagcattaggggagtacctggaacgagagcgctcatctttccccaggttctactttgtgggtgatgaggatttgcttgaaatcattggaaatagcaagaatgtggctaagttgcagaagcacttcaagaaaatgttcgctggcgtttccagcatcatcttaaatgaggacagctctgtggtcctcggcatttcctcccgagaaggggaggaggttatgtttaaaactccagtgtccatcactgaacaccccaaaatcaacgagtggctcactctggtggaaaaggagatgagagtcaccttggccaaacttctggcagaatctgtaacagaagtggagatttttggaaaagcaacttctattgacccaaatacctacattacttggattgataaataccaggcccagctagtggttttgtcggcccagatagcctggtctgagaacgtggagaatgcactaagcaacgtcggaggaggcggaaacgtggggcccttgcagtctgtgctcagcaacgtggaggtcacactcaacgtcttagcagattctgtcctcatggagcagccccctctccggagaaggaaactggagcacttgatcacagagttggttcaccaaagagatgttaccaggtccttgatcaaaagcaagattgacaacgccaaatctttcgaatggctcagccagatgcgattttactttgaccctaagcaaacggacgtgttacagcagctgtccatccagatggcaaatgccaagtttaactacggctttgagtacctgggcgttcaagacaagctggttcagacgcccctcacggaccgctgctacttgacaatgacacaggctctggaggccaggctcgggggctccccgttcggaccggctggaacaggaaagacggagtctgtcaaagccctcggccatcagctggggcgattcgtcttagttttcaactgtgacgaaacctttgatttccaggcgatgggacggatcttcgtggggctttgccaagtgggcgcgtggggctgcttcgatgagtttaaccggctggaggagcggatgctgtccgctgtgtcccagcaggtgcagtgcatacaagaggcactgcgggagcactccaaccccaactacgacaagacctcagcccccattacttgtgagctgctgaacaaacaagtcaaggttagcccagatatggctatcttcatcaccatgaatccaggctacgcaggccgctcaaacctccctgacaacctcaagaagctcttccggagcctggcgatgaccaagcctgaccggcagctgatcgcccaggtcatgctgtactcacagggcttccggactgctgaggtccttgccaacaaaatcgtcccgttctttaaactgtgtgacgagcagctgtcttctcaaagccattatgactttggtctgcgggctttgaagagcgtgctcgtgagtccaggcaacgtgaagagggagaggatccagaagataaagagggagaaagaagagcgaggggaagccgtcgatgaaggagagatcgctgagaacctgcctgagcaggagattctgatccagagtttctgcgagacgatggtgcccaagctcgtggcggaagacatcccgctgctcttcagtctcctgtcagacgtgttccctggggtgcagtaccaccgtggggagatgacagaccttcgagaagagctgaagaaagtgtgtaaggagatgtacttgacgtatggtgatggagaagaagttggcgggatgtgggttgaaaaggttctccagctctatcagatcacccagattaaccatggcctgatgatggttgggccttcaggaagcgggaagagcatggcctggcgtgtgctgctgaaagctcttgagaggctcgagggtgtggagggtgtggcccacataattgaccccaaggccatcagcaaagaccacctctacggaaccttggatcccaacaccagggagtggacagacggactcttcacacatgtgctgagaaagatcatagacaatgtgagaggcgagctgcagaagcgccagtggattgtcttcgatggtgatgtggaccccgagtgggtggagaacctcaactccgtgctcgacgacaacaagctcttgacattgcccaatggagagcgtcttagcctgccacccaatgtgcgaataatgtttgaggtgcaggacttgaagtatgcaaccctggccaccgtgtctcgctgcggcatggtctggttcagtgaggacctgctgagcacggacatgatcttcaacaacttcctggccaggctgcgcacgattcccctggatgagggggaggatgaggcacagcgaaggcgcaaaggcaaagaagacgagggtgaagaggccgcctctccaatgctgcagattcaaagagatgcagcaacgatcatgcagccatacttcacgtccaatggcctggtcaccaaggcgctggagcatgccttcaagctggagcacatcatggacctgacccgcctgcgctgcctgggctcactcttctccatgctgcaccagggctgccgcaatgtggcccagtacaatgccaaccatcctgatttccccatgcagattgagcagctggagcgctacattcagcgctatctggtgtatgccatcctctggtccttatctggagacagccggctgaaaatgagagcagagctgggcgagtacatcagaaggatcaccactgtgcctctgcccaccgcacccaacatccccatcattgactatgaggtgtccatcagtggagaatggtcaccgtggcaggccaaggtgcctcagattgaagtggagacacacaaggtagcagccccagatgtcgtcgtgccaaccctagatacagtccgccatgaagctctcttgtacacctggctggctgagcacaaacccctggtcttatgcggccctcctgggtctggcaagaccatgacactcttcagcgccctccgagccttgcctgacatggaggttgtgggcctgaacttctcaagtgccactacaccagagctgttgctgaagacgtttgaccactactgcgaataccggcgcacccctaacggtgttgtcttggctcctgttcagcttggaaagtggctagtcctgttttgtgatgaaatcaacttgccagatatggataagtacggtacccagagagtcatctccttcatcagacagatggtggagcatggaggcttctatcgtacctcagaccaaacatgggtgaagctagagagaatccagtttgttggagcttgcaatccgcccactgaccctgggagaaagcccctctcacataggttcttgcgccacgtgcctgttgtgtatgtggattacccaggaccagcctccctgacgcagatctatggcaccttcaaccgcgccatgctgagactcattccctcgctccgcacctatgcagaacccctcaccgcagccatggtggagttctataccatgtcccaggagagatttactcaggacacacagccacactatatctattcaccccgtgagatgactcggtgggtaagaggaatctttgaagcactgagacccctggagacattgcctgttgaaggtctcattcgcatttgggcacatgaagccctccgtctcttccaagacaggcttgtggaggatgaagagcggcgctggactgatgagaacatcgacatggttgccttgaagcatttccctaacatagacaaagagaaagccatgagccggcctatcctgtacagcaactggctgtcaaaggactatatcccagttgaccaagaggagctaagggattatgtcaaggctaggctgaaggtcttctatgaagaagagcttgacgttcccctggtcttgttcaatgaagtgctggaccatgtgctcaggattgacaggatattccgacaacctcaaggccacttgcttctcattggtgttagtggagctggaaagaccaccctgtctcggtttgtcgcctggatgaatggcttgagtgtctatcagattaaggtccacaggaaatacactggggaagactttgatgaagacctcaggacagtgctgcgacgctcgggctgcaaaaatgagaagatagcattcataatggatgaatccaatgtcttagactctgggttcctggaacgaatgaatactctgctggccaacggcgaggttcctgggctctttgaaggggacgagtatgccacgttgatgactcagtgcaaagagggagcacagaaggagggcctcatgctggactcacatgaggagctctacaagtggttcaccagccaggtgatccgcaacctgcacgtggtgttcaccatgaacccgtcctcagaggggctcaaggacagggcggccacgtcaccagcccttttcaacaggtgtgtgctgaactggtttggtgactggtccacagaagcactctatcaagttggcaaagaattcaccagtaaaatggacctggagaagccaaactatatagtgcctgactacatgccagttgtgtacgataaacttccacagcccccaacacaccgggaagccattgtgaacagctgtgtgtttgttcatcagactcttcaccaggctaacgcacgcctggcaaagcgaggcggcagaacaatggccatcacacctcggcactacctggacttcatcaaccactacgccaacctcttccatgagaagcgcagcgagttggaggagcagcagatgcacctgaacgttgggctccgaaaaatcaaagagactgtggaccaggtggaagaactgcgccgtgccctgaggatcaagagccaagagctggaggtcaagaacgcagcagccaatgacaagctgaagaaaatggtgaaagaccagcaagaggctgagaagaaaaaggtcatgagccaagaaattcaggagcagctgcacaagcagcaggaagtgattgcagataagcagatgagtgtcaaggaggatctggataaagtagagcctgctgtcatcgaggcccagaatgctgtgaagtccatcaagaagcagcacctggtggaggtaaggtccatggccaaccctccagctgccgtgaagctggctctggagtccatctgcctgctgcttggtgagagcaccacggactggaagcagatccgctccatcatcatgagagagaacttcatccccaccatcgtcaacttctcagccgaggagatcagtgacgccataagagagaagatgaagaaaaactacatgtccaaccccagttacaactacgaaatcgtcaaccgggcttctctggcttgcggccctatggtgaagtgggcaattgcacagctcaattatgcagacatgttaaagcgagtggagcccctgcggaatgagctgcagaagctggaagatgatgccaaggacaaccagcagaaagccaatgaggtggagcagatgatccgggatctggaagccagcatcgcccgctacaaggaggagtatgctgtcctcatctcggaggcccaggccatcaaggcagacctggcagctgtcgaagcgaaagtaaaccgaagcactgcacttctaaagagtttatctgctgaaagggaacgttgggaaaagacaagtgaaacgttcaaaaaccagatgtctaccattgctggggactgcctcctgtcggcggccttcattgcttatgcaggctactttgaccagcagatgcgccagaacttgttcaccacctggtctcatcacttacagcaagccaacatccagttccgcacagacattgccaggacggagtacctctccaatgctgacgagcgcctccgctggcaggccagctccctgcctgctgacgacctgtgcacagaaaacgccatcatgctaaagcggttcaataggtacccgttgatcattgacccctccggacaggccacagaattcatcatgaatgagtataaggaccggaagatcacaaggaccagcttcttagacgatgccttccggaagaatttggagagtgctctgagatttggcaatccccttctcgtccaggatgtggagagctacgatccagttttgaatccagtactgaaccgtgaagtccggcgaacaggagggagagtgctgattaccctcggtgaccaagacattgacctgtcaccatcctttgtcatctttctgtccacccgagacccaactgtggagttcccaccagatctctgttcccgggtgaccttcgtgaacttcacggtcacccgcagcagtttacagagccagtgtctcaatgaagttcttaaagcagaaaggcccgatgtggatgagaagcgttctgacctcttgaagctgcaaggggagttccagctccgtttacggcaactggaaaagtctctgctccaagctctgaacgaggtaaaaggccgcattctggatgacgacaccatcattacaaccctggaaaatctgaagcgggaagccgccgaggtcaccagaaaggtggaggagacggacattgtcatgcaggaggtagagaccgtgtcccagcagtacctgccgctgtccactgcatgcagcagcatctacttcactatggagtccctgaagcaggttcacttcctgtatcagtactcactgcagttcttcctggacatctaccacaatgtgctctatgagaaccccaacctgaagggcgccaccgatcacacacagcgcctctctgtcatcaccaaggacctcttccaggtggcctttaaccgggtggcccgaggcatgctgcaccaggaccacatcaccttcgccatgctgctggcgaggatcaagctgaaaggcaccatgggggagcccacctatgacgcagagttccagcacttcctccgagggaaggagatcgtgctgagtgctggctccacccccaaagtccagggcctgactgtggagcaggcggaagctgtggcaaggttgagctgtctgcctgcctttaaagatctcattgccaaggttcaggcagatgagcagtttggcatttggctggagagcagttcaccagagcagacagtgccatacctctggactgaggagacgcctgcaactcccatcgggcaggccatccaccgcctactcctgattcaagctttccgacccgaccgcctgctggccatggcccacatgtttgtttccacaaacctcggagagtccttcatgtccatcatggagcagccacttgacctcacccacattgtgggcacagaggtgaagccaaacacacctgtcctgatgtgctctgtgcctgggtatgatgccagcggacatgtcgaggacctcgccgcagagcagaacacacagatcacttctattgccattggctcagcagaaggctttaaccaagcagataaggcgatcaacaccgcggtgaagtcaggcaggtgggtgatgctgaagaatgtgcacctggcccccgggtggctgatgcagctggaaaagaagcttcactccctgcagccacacgcctgcttccgactcttcctcaccatggagatcaaccccagggtgcccgtgaacctgctccgtgcaggtcggatctttgtgtttgagccgccacctggcgtgaaggccaacatgctgaggaccttcagcagcatccccgtctccaggatgtgcaagtctccaaatgagcgagcccgcttgtacttcctgctggcctggttccatgctgtcatccaagagcgcctgcgctatgctccactcgggtggtccaagaaatacgaatttggagaatctgaccttcgatcggcttgtgacacggtggacacatggttggatgacacagccaagggccgacagaacatctcaccagataagatcccatggtctgccctgaagacattgatggcccagtccatctatggtgggcgggtggacaatgagtttgaccagcgtctgctcaataccttcctggagcgcctgtttaccacccggagtttcgatagtgaattcaagctggcgtgcaaggtcgatgggcacaaggacattcagatgcctgacggtatcaggcgagaggagtttgtgcagtgggtggagctgctgcctgacgcccagacaccctcatggctgggcctccccaacaatgctgaaagggtcctgcttaccacccaaggcgtggacatgatcagcaagatgctgaagatgcagatgctggaggacgaggacgacctggcctacgcagagacggagaagaagacaaggacggacttcacctcagacggccgtccagcctggatgagaacactgcacacgacggcctcaaactggctgcacctcatcccacagacactgagcccactgaagcgcacggtggagaacatcaaggaccctttgtttaggttcttcgagagagaggtgaagatgggggccaagttactgcaagatgtgcgccaagaccttgctgacgtcgtccaagtgtgcgaggggaaaaagaagcagacaaactacctgcgcacgctcatcaatgagctggtgaaagggatcttgccccggagctggtcccattacacagtacctgcaggcatgacggtgatccagtgggtgtcagatttcagcgagaggatcaaacagctgcagaacatctcacaggctgctgcagccgggggtgccaaggaactgaagaacatccacgtgtgcctgggtgccctgtttgtgcctgaggcctacatcactgccaccagacagtatgtggcacaagccaacagctggtccctggaggagctctgcctcgaagtcaatgtcaccgcctcccagagtaccacccttgatgcgtgcagctttggggtcacaggtctgaagctccaaggggccacgtgcagcaacaacaaactctcgctgtccaatgcgatctccacagtcctccccctcacacagctacgctgggggaagcaaactagtgctgagaagaaggccagtgtggtgactttacctgtctatctgaacttcacgcgggcagacctcatcttcactgtagactttgaaattgctacaaaggaagatcctcgaagcttctatgagcgtggagttgcagttctgtgcactgagtaaagctaagcttttcccgaatcctctttctggaatagtagaacccaatatttaactctcattcatctttacacatttggagggtttgatggacccgtgaaaagcaagtggtcggttagcgttggtggtgaaaggtgctgcagttggaaatgggctgggaagggtgaagtgtgcggtttccaagggctgaccaaatggctggttttattaaataaaacactaagcatg

SEQ ID NO: 139 - DNA, 892 bp, rat; identical to SEQ ID NO: 42

SEQ ID NO: 140 - DNA, 2707 bp, rat
gcgtacctgctgtgggctgagacccaattttcctggggccaatctctgcttacgcctgctgtgccctctccgcggtcctgcctgaagtttgccctaacgcacaatggaaggtcctcgctcagacgtgggccgctggggtaggagcccctggcagcccacgacaccgtcgccagagccagagccagagccagagccagacagaagctcgcgctcccgccgaggaggaggccgctccttctgggctcgctgttgtggctgctgctcctgcgggaacagagctgatgatgactggggacccgaaccttctggctccagaagccgagggaccagctcccggggtggaggctcccggggtggggactctcggggtagggactctcgaggtggccgaagacctgagtctcggggcagtggtgtgaatgcagctggagatggcaccatccgagagggaatgctggttgtgaatggtgtagatctgctgtgctcgcgatcagaccagaaccgccgagagcaccacaccgatgagtttgaatatgacgagctaattttgcgccgtgggcagcccttccacataatcctcttcctgaaccgggagtatgagtcctctgatcgcattgcccttgagcttctcatcggaaacaatcctgaggtgggcaagggcacccacgtgatcatcccagtgggtaagggaggcagcggtggctggaaggcccaagtgactaagaccaatggacacaacctaaccctgcgcgtccacacctcccctaatgccatcattggcaagtttcaattcactgtccgtacacgctcagaggctggcgagttccagctgccctttgacccccgcaatgagatctacatcctcttcaatccctggtgtccagaggacatagtgtatgtggaccacgaagactggcgacaagaatatgtgcttaatgagtctggaagaatctactatgggacagaagcacagattggcgaacggacctggaattatggccagtttgaccatggggtgctggatgcctgcctgtacattctggatcggagggggatgccatatggaggtcgcggggacccagtcagtgtctctcgggtcgtctctgccatggtgaactccctggatgacaatggagttctgattgggaactggactggcgactactctcgaggcaccaatccctcagcgtgggtgggcagtgtggagatcctgcttagctacctacgcaccggctattccgtcccctatggccaatgctgggtctttgccggtgtgaccaccacagtgctccgatgtctgggccttgctacccgtactgtcaccaacttcaactctgcacacgacacggacacgtccctcactatggacatttattttgatgagaacatgaagccactggagcacctgaaccacgattctgtttggaacttccacgtgtggaacgactgctggatgaagaggccagatctgccctcaggctttgatgggtggcaggttgtggatgccacaccccaggagaccagcagtggcatcttctgctgtggcccctgttcagtggagtccatcaagaatggcttagtctacatgaagtatgacacacctttcatttttgccgaggtaaacagtgataaggtatactggcagcggcaggatgacggcagcttcaagatcgtgtatgtggaagagaaagccattggcacactgattgtcacaaaggcgatcaactccaacatgcgagaggacatcacccacatctataagcacccagaaggctcagaagcagagaggaaggctgtggaaaaggctgcggcccatggcagcaaacctaatgtgtatgccacccgggactctgctgaggatgtggcaatgcaggtggaggcacaggatgctgtgatggggcaggatctgactgtctctgtggtgttgaccaatcgtggcagtagccgacgcactgtgaagttgcacctctacctttgtgtcacctactacactggtgtctctgggcctaccttcaaggagaccaagaaagaagtggtattagccccaggagcctcggacactgtggccatgcctgtggcctacaaggaatacaagccccaccttgtggaccagggggcaatgttgctcaatgtctcaggccatgtcaaggagagtgggcaggtactagccaagcaacacaccttccgtttgcgcaccccagacctctctctgacattactgggagctgcagtagttggccaggaatgtgaagtccagatcgtgttcaagaaccccctgcctatcaccctcaccaacgttgtcttccggctcgaaggttctgggttacagagacccaaggtcctcaatgttggggacatcgggggtaacgagacggttacactgcgccagacatttgttcctgtgcgaccaggcccccgccagctcattgccagtctggacagtccacagctttcccaagtacacggtgtcattcaagtggatgtggccccatcctctggaggcagaggtttctcagaggctgtaggtgacagtcgctccggggagaacatacctatggcatttcgaggtggagcttagccctgggccaggagcaataggactgaaatcagatgaacaaggacattgccccaagatggggtcctaccataaagtagctcccctggctcggacaagaaggctggggcacccggggaggctgttactctt

SEQ ID NO: 141 - DNA, 642 bp, rat
gaggagagcttttctactttattacaaagagaagaagcctttatgtggtcagaaaatacaagattgatcttttttctcttcctatgaaacgctgctgttcacacagccagagtgaattgtctcagttcacgtcttgaagccccatcacattcacttgggtatggatgtccttggctgctgaaaatctggccctttagtgcacagggcgacaaagtcccctgaccagcagttccagaatgtcccattttcatatattgcatccatgcacacctcctaaaaatgaggtacagcagggcaaacattttccaaaatagatgtcatatatataatatatacacattcgtacatacatacctttattcatgtgatgtccaaaatttaaaaaaaatgtacacatttattacaaaatcgtaacaaagactggacagtgttttgctcattctggaaagatgaagctcagtaacaacacagccctggagccaccagagactgtggtaatctctctacagtcatattcttgcagtaagcctggagaaactgcctttcagaaacacaaggggaagtaaaaagaaagaagcagaccttgctcatctttccaaatgaaatacgagaaggatctccacatcaaaacgcacaaacatc

SEQ ID NO: 142 - DNA, 585 bp, rat
tttttttttttttttttgattttcaatgataaacttttattctgaatatactgtttttgcacaagatttaacacaacattttctgggattataaatattttttataacagtattatacaaatttttacaaaatgtgttcatccgactagttaatttccacaaaagtgtccagagaacataataagggggagaaaaaaaatctgttgttcacaaaagccacttggcgttttgcttgatgcacaatgagcatttcatgaagagaatccctaaaacatgatcccacagtcataccgcacaaggaaagaacagcttggccaggtcacattggaaactcaattggcatttacaccggacagcatgccaggagtctcagtggaatttccatggttcttttttgtgtgaactagaaacaaggtatacgaaacctcccgtaacagcaatctatttctgcaaaattctggccattttcatgacctgatagttctgttttagtgatttgctctttacagaaatatacaccagatagtgaccatatcaacattctgccatggagaacaatgcaagttccagcgaatgataaaataa

SEQ ID NO: 143 - DNA, 385 bp, rat
tttttttttttttttttgagcttacatttttttaatatttcgccacagagacggtaggccgatacagagagaacaatgaaaggcagtatttctacaacaaaaccaccatttcaccactcagagtgaagcaacctttgagtgaagaaggaagtcaagatctggcttttcctaagtaaaggcacttagagtagacagttccaattgacagcagcataaaatccaacttagcatcgactctcttgaaatgatggcccagtcaatacccaccactcatatgcacacgtaaaaaccaacaaagaagaaaaccaacttacaggaataagttatgaatacctgctccccaaaaggagtttaaaaactaagctggtaacagctctacagaata

SEQ ID NO: 144 - DNA, 512 bp, rat
tttttttttttttttttccccatcaaatgattttattagttaatgaaacagcttgaagacaattcactttgtccaacactcttctagaaaatagttcaagttgtaaacgcacttccaatacataaaacagaattacttgaccgtacacaaatttcagctcaaaatacaacactctgttttcttaccattataaaacccagtccatacaaactacgtaaaaagagaaaacactttcactgatcctgggtacgagggaacagcacaatgaccacatttccccaggacccaggtctagtgctagagctgaggaccggaccccagtcagccacaatacccaagtcctgtaaacaaaatgcagccacttacggaaatcaacacacccttctgcatcggtgttgcttgtaaaccataaaataactttgtaagaaacattacaagttaaaaaaatgatttctgactttgctatagtagacaccagcaaaggaatagaaaatcggtcactccacccaacg

SEQ ID NO: 145 - DNA, 1380 bp, rat
aggtcgcgcaggcgcagacggcgttggttcgagaagaccttcagcgttgccttggtggagcggtacgggcccaccctcgggttgtagatatgtgtagcacaccaacttactgcgacctaggaaaggctgccaaggatgtctttaacaaagggtatgggtttggcatggtcaaaatagatctgaaaaccaagtcttgtagtggagtggaattttctacttctggtcatgcttatactgatacagggaaagcatcaggcaacctagagaccaaatataaggtctgtaactacgggctcatcttcacccaaaagtggaatacagacaatactcttgggacagaaatctcttgggagaataagttggctgaagggttgaaactgacggttgataccatatttgtaccaaacacagggaagaagagtgggaaattaaaggcctcctatagacgggattgttttagtgtgggcagtaaggttgacatagatttttctggaccgaccatctatggctgggccgtgttggcctttgaaggttggcttgctggctaccagatgagttttgacacagccaaatccaaactgtgtcagaataattttgctcttggttacaaggctgaagacttccaactgcatactcatgtaaacgatggcactgaatttggaggctccatctaccagagagttaatgagaagatcgaaacatcaataaacctggcatggacagctggcagcaacaacactcgttttggcatcgctgctaagtataggctggattgtagaacttctctgtctgccaaagtaaacaatgccagtttaattggactgggttatacgcagagtctccgaccgggagtcaaactgaccctgtcagctttagtggatggaaagaacttcaatgcaggaggccacaaggttggcttgggatttgaactggaagcttaatggggttttgagtagagtatcaattgtccctggaaatgaagagaaatgacaccactatgttttggccttaaaattctgtgaaatttcaaaagtgaactttttattcttccaaagaattgtaattcttcccacaccgaagtctagagattacagatccatccagtgggaggtccttgaaggcaatgcctggaaattgtcatgtttgtgccacatttcagttgagttctgcagagttaattttaaatatgttcctcagcaacaacgtagtgtcacgttaaaggaagtgatctgcccggtctgtacatcgtgtcctgcatgtcccaactccactttccatgaccttttgttacatcagtctctgctctagtgagacctttggtttgcatcagagtaaaataaacccatcacatttggaacataaaaaaaaaaaaaaaaaaaa

SEQ ID NO: 146 - DNA, 600 bp, rat
tttttttttttttttttgcttgggaattatgtttattgaaaaagtaaaaagtatcaccataaaaaaaaaaaaacctggagtaaaagccaggccagagaaatgggtataggggcaagagtgtcgtgccccacaagtcctaaccagcctggctgcctcactgcatgttcagtgggcagtctagtccctggagcaaggtgcttgccgcttctccaaaggggcacaaacaccaaaagggcagggctggctcaatccatgctggttcctttgaagagttccaccaagtccttgaagtccgggtcaatgaggtcggagggcaaatcgccatcatcattggttgcatctctgtctgcccccaaagagatgagatacctggctatgtcagggtatccatcactgcaagcgatatgcagtggtgtccagcctgtctcatcccgctggtgaatgtcagcaccatatttgactagcaacttcacacactccaggtttccagagagcacagcttcatgaagagcagccaggccggaggggtagatagtgtctagcgagactttccgagctcggataaagcgcccacttgctccaggtcgccttggcggatgt

SEQ ID NO: 147 - DNA, 615 bp, rat; identical to SEQ ID NO: 111

SEQ ID NO: 148 - DNA, 2312 bp, rat
agcagtgccagtgagggtccggggccccagagggaggctgccagggacagctctgagcaggcccagtccagaaggaccgagaccatcagccgtggacgctcaggacactccactgggagagcccacgaagaccgccacgagcaggcaacagaccggtctgccggctccgggtccaggggaggccaggccggctcccacagtgagagcgaggcctccggtggtcaggccggccgcagaggcactgcagccaccaggcacacatctcgccccgaacagtctccagacactgctggccggaccggatccagccgtggacagcagtccgcccaacgacatggtgactcaaccccgggcagcacaagaaccggctccagaggaagaggagagtccccagctggccagcagtcccccgacagagccaggcacatcgaatccaggaggggtagaacccgggaggccagcgccagccagtccagtgacagcgaaggccattctggagcccatgccgggatcgggcaagggcagacctcaaccattcacaggagggcaggctccagctcagggagccagcgggcctctgctggtggccaagcagctgacacctccagtcgctcaggggccagtcaaggccaggcatcaggccagggtcgtgcagggtcccgaagcagggaagctcagggcatcgctcgtcatgggcagtcgacagacagccacaggcactctggggccgggcaagcacaagcccacacagccacaagcattgacagcaggaggcctcgcgggtccagcgagagtcaggccagcgacagcgagggccactccgactactcagaagcacacacacagggagcccacggtgggatccaaacaagccagaggcacgagcagcgaccctcccgaggccagcagggctccggacacccccaggtgtactactatggtgtagaagaaaccgaggacgagtccgatgcccagcaggggcaccagcagcagcagcagcagcagcggcagcagcagcggcagcggcagcagcacgaacaagaacgagaacatgaacagcagcagccagagtccagccagaggcagcaggggtccagtgggagaacgcaacgtgcagctcgccatgaacaggatagcgacagcaccaggcaacggggctctcaccaggcgcacagctccgctcgcacccaggaggagatcgcacgcggaaggtctggagccactgcaagtgagggtccggggccccagagggaggctgccagggacagctctgagcacgcccagtccagaaggaccgagaccagcagccgtggacgctcaggacactccactgggagagcccacgaagaccgccaccagcaggcaacagaccgctctgcccgctccgggtccaggggaggccaggccggctcccacagtgagagcgaggcctccggtggtcaggccggccgcagaggcactgcagccaccaggcacacatctcgccccgaacagtctccagacactgctggccggaccggatccagccgtggacagcagtccgcccaacgacatggtgactcaaccccgggcagcacaagaaccggctccagaggaagaggagagtccccagctggccagcagtcccccgacagagccaggcacatcgaatccaggaggggtagaacccgggaggccagcgccagccagtccagtgacagcgaaggccattctggagcccatgccgggatcgggcaagggcagacctcaaccactcacaggagggcaggctccagctcagggagccagcaggcctctgttgaaggttctgatggctatgattctgttgttaaatctaaatatcttagttttagtcaatcatattgctattattattaacaatgagagcagtttgcaacaattaattgctgaaatataacctcacatagggattgttcattttagtatttgggtttttggttccttattctccttaattcatatcaggtatttccttttcctttatagttcctttactctatcatattttgagcctaaatcgcttaggatcaggaatttaaattttaaactcatcttgtttcctatcacagttctttctttcgtctttaaaatgtttaaattggttcactgaagactagacacaattttacccaaaaattttaaaatactcaaaaatttataatgagtcttttgtatgcataatgccctgcctgcactatgaatttatcatgtctatcctttgtactttcttcttcactcattctttcccattggacatttctgataaaccaaattaaaattgtctaataaat

SEQ ID NO: 149 - DNA, 649 bp, rat
aaggccaagaaggccatcactgacgccgccatgatggcggaggagctgaagaaggagcaggacaccagcgcccacctggagcggatgaagaagaacatggagcagacggtgaaggacctgcagcaccgtctggacgaggctgagcagctggcgctgaagggcggcaagaagcagatccagaaactggaggccagagtgagggagcttgaaaacgaggtggaaaatgaacagaagcgcaacattgaagctgtcaagggtcttcgcaagcatgagagaagagtaaaggaactcacctaccagaccgaggaggaccgcaagaacgtgctgaggctgcaggacctagtggataaattacagactaaagtgaaagcctacaagagacaagcagaggaggctgaggaacaatccaacgtcaacctggccaagttccgcaagatccagcacgagctggaggaagccgaggagcgggccgacatcgccgagtcccaggtcaacaagctgcgggtgaagagccgagaggttcacaccaaagtcataagcgaagaatagctcaattccttctgttgaaaggtgacagaagaaatcacacaatgtgacgttctttgtcactgtcctgtatatcaaggatccaagtcataagcgaagaata

SEQ ID NO: 150 - DNA, 3581 bp, rat
tgaggagtaggaggaggaggtgggcctggggagcgggatgtccagcgctacgacttgctggtgaatgctgaggagagtcgcggttgctgcagtctttgccaccgggaggaagttgcggtgtgaggccgggcgggacgtcacggctgtgggacgaatcgaagcacggggtctgtgcgaagaatcagcgaaaccgtttcctacgctgaccatgcctggcagaaacaaggcgaagtccacctgcagttgcccggacctgcagcctaatggacaggacttgggcgagagcggccgggttgctcgtctaggagcggatgaatctgaggaggagggacggtctctcagtaatgtcggggaccctgagatcatcaagtctcccagcgatcccaagcagtaccgatacatcaaattacagaatggcttgcaggctcttttgatttcagatctaagtaatgtggagggtaaaacaggaaatgcaacagatgaagaggaagaggaagaagaggaagaggaggagggggaagaggaagaggaagaggaagaagacgatgacgatgatgatgatgaagactctggagctgagatacaggatgatgatgaggaaggctttgacgatgaagaggaatttgatgatgatgaacatgatgatgatgatcttgataatgaggaaaatgaactggaagaactggaagagcgggtggaagccagaaagaaaaccactgagaaacagtctgcagcggctctgtgtgttggagttgggagctttgctgatccagatgacctgcctgggctggcacactttttggagcacatggtattcatgggtagtttgaaatacccagatgagaatggatttgatgccttcctcaagaaacatggaggtagtgataatgcctcaaccgattgtgaacgcacagtctttcagtttgatgtccagagaaagtatttcaaggaagccctggatagatgggcccagttcttcatccatccactgatgatcagagatgcaattgaccgagaggtggaagctgtggacagtgagtatcagcttgcaagaccttctgatgcaaacagaaaagaaatgttgtttggaagtcttgctagacctggacatcctatggggaagtttttttggggaaatgctgagacactcaagcatgaaccaaagaagaataatattgatacacatgccagactgagagagttctggatgcgttactactctgctcattacatgaccttagtagtccagtccaaagaaaccttggacactttggaaaagtgggtgacggagatcttctctcagataccaaacaatgggctacctaaaccaaactttagccatttaacggatccttttgacacaccagcatttaacaaactttatagagttgttccaatcagaaaaatccatgctctgaccatcacgtgggcccttcctccgcagcagcaacactacagggtgaagccacttcattatatctcctggcttgtggggcatgaaggcaaaggcagcatcctttcttaccttagaaaaaagtgctgggctcttgcgttgtttggtggaaatggtgagacaggttttgagcaaaattctacctactcagtgttcagcatttctatcactctgactgatgaggggtatgagcatttttatgaggttgctcacactgtctttcagtatttaaaaatgctgcagaaactaggtccggagaaaagagtttttgaagagattcagaaaattgaggataatgaatttcattaccaagaacagacagatccagttgagtacgtggagaacatgtgtgagaacatgcagctgtacccacgtcaggactttctcactggagatcagcttctgtttgagtacaagccagaagtcattgccgaggcccttaatcagctagttcctcaaaaggcaaatctcgtgcttctgtctggtgctaacgagggaagatgtgacctcaaggagaagtggtttgggactcagtacagcatagaagatattgaaaactcttggactgaactgtggaagagcaattttgacttaaattcagaccttcatctaccagctgaaaacaaatacatagccacggactttacattgaaggcttttgattgccctgaaactgaataccctgctaaaattgtgaataccccacaaggttgcctgtggtataagaaagacaacaaattcaaaatccccaaagcctatatacgatttcatctgatctcacctttgatacagaaatctgcagcaaatgttgtcctcttcgacatcttcgtcaacattcttactcacaaccttgctgagccagcctatgaagccgatgtggcccagctggagtataaactggtagccggagagcacggtttaatcatccgagtgaagggattcaaccacaaactacctctgctcttccagctcatcattgactacctgactgagttcagctccacgcccgctgtcttcaccatgataactgagcagctgaagaagacctacttcaacatcctcatcaagcctgagactctggccaaagatgtgcggcttttaattctggaatattcccgctggtctatgattgacaagtaccgagctttgatggatggcctttcccttgagtctctgctaaactttgtcaaggattttaaatcccaactctttgttgagggcctggtgcaagggaatgtcaccagcacggaatcgatggatttcctaagatacgttgttgacaagctgaacttcgtgcccctggagcgggagatgcccgtgcagttccaggtggtggagctgccgagcggccaccacctgtgcaaagtcagagccctgaataagggggacgccaactctgaagtcactgtgtactaccagtcaggtacaaggagtctgagagaatacacgctcatggagctgcttgtgatgcacatggaggagccctgctttgacttccttcgaaccaagcagacccttgggtaccacgtctacccgacctgtaggaacacatctggcattctaggattttctgtaactgttgggactcaggcaaccaaatacaactctgaaactgttgacaagaagatagaagaatttctttccagctttgaggagaagattgagaacctcacagaggatgcattcaatactcaggtcacagctctgatcaagttgaaagagtgtgaggacacccacctcggggaggaggtggacaggaactggaatgaagtggtgacacagcagtatctctttgaccgccttgcccatgagattgaagcgctgaagtctttctcaaagtcagacctggtcagttggttcaaggctcacagaggacctgggagtaaaatgctcagcgttcatgttgttggatatgggaagtatgaactggaagaggacggcgctcccgtttgtgaggatccgaattctcgtgaagggatgcagctaatctacctgccaccctctcctctcctggcagagtccaccacccccattactgacatcagggccttcacagcgacgctcagcctcttcccctaccataagatagtcaaataaactgcagtctcactggcctgaagcaacttgt

SEQ ID NO: 151 - DNA, 1707 bp, rat
atgtcccatcaacacacagtgccagtgactgttccagctgtggttcaggaatctctcaagactgtatgttctccagctcaaactcagcaggaacaaacaaagcaaccaactccatatcctgcacaatgccaggtcttcactgacactcaagagaagggctttcccaaacatgaggagaaggaggcaaaccccgtgaaagatctgcctgagcaagagagtgagcaccaccagcagccaggaccacagaagcagcagctgcaggtgaaaaagccagagcaggagctgcaggaacaggaactgcattcggagaagcagccacaggagccacaggggctcctgtgcctgggacagcaacagcagcgagagccacaagagcaagaacagcaccttagacagcaccagcagccacagcaagagtcacaggggcaggggctgtgcttggggcagcagcaagatgtgctggcaccacaggagctgcatatgggacagcaccagaaggagaagctgcaggagccagaactgcctctgggtcagcagcagaaaactccagaggaacaggaactgattctaggagaaaagcagcagaagctgcacctggtagagaggcaccaagagccacaggagcaggagctgcaccacggacagaaacagaagcaacagcaaccacaagaacaggagttgcagttggtacagcaccagaagcagaagcagcatgaaccagaattgtgcctgaggaagcagcagcagcaggagtcacatgagcgagaactgcacctgggaaagcagcagcagcaggagtcacatgagccagaactgcacctgggaaagcagcagcatcaggagtcacatgaaccagaactgcacctgggaaagcagcagcatcaggagtcatgtgagccagaactgcacctaggggaacagcagcatcaggagcagcagcagcatcaggagtcatgtgagccagaactgcacctagggaaacagcagcatcaagagactcaggagtcagaactgcaactgggaaagcagcagaaaccacatgagccagatatggtactggatccgaaagagaagcagaaacttcatgacccagaactgcacctgggaaagcagcagcaccaggagtctcaggagtcagaactgcaagtggaaaagaaacagcatgagaagtccccagagccagaactgcacctgggaaagcagcaggagttacatgagcctgatatgacagaggatcagaaagagaagcagagtcttcatgaaccagaactgcacctgggaaagcagcaggagtcacatgagcctgatatgacagaggatcagaaagagaagcagagtctttatgaaccagaactgcacctgggaaagcagcaggaacaacagatagagtatgaaggctaccaaagatcaaaaagtctgaatcagttacttaagcaagagaaagcttccaggggacaggagctggatgactcacatctagaacaggagaaggagctcttggaccagcgattggatcaagaactagtaaataaggatgagcaactggaaagaaagaagcacaaattggagaacctgacacagaaggagaagcagataaagcaattagtaccaagcactgacagagtccaagagactcagccaatccaaccagtgaaagaagactctctcactacaaagaagcagcagcacagccatgaagtgcagtga

SEQ ID NO: 152 - DNA, 1410 bp, rat
tcaccaccacctccacagcaaagacagacactcaggagccagccagccagggtcccaaaggccgtcaccatgccgttcggcaacacccacaacaagttcaagctgaactacaagtcgcaggaggagtacccagacctcagcaaacacaacaaccacatggccaaggtgctgactcctgacctgtacaataagcttcgagacaaggagaccccatccggcttcactctggacgatgtcatccagactggggtggacaacccgggtcaccctttcatcatgacggtcggctgtgtggccggcgatgaggagtcctacactgttttcaaggacctgtttgaccccatcatccaggaccgccatggtggcttcaaacccacagacaagcataagaccgacctcaaccacgagaacctcaagggtggagacgatctggaccccaactatgtgctgagcagccgcgtgcgcactggccgcagcatcaagggctacactctgcccccgcactgctcccgcggagagcgccgtgctgtagagaagctgtccgtggaagctctcaacagcctgacaggcgagttcaagggcaaatactaccctctgaagagcatgacagagcaggagcagcagcagctcattgatgaccacttcctgtttgacaagcccgtgtcacctctgctgctggcctcaggcatggcccgagactggcccgacgcccgtggcatctggcacaacgacaacaaaagcttcctggtgtgggtgaatgaggaggaccaccttcgcgtgatctccatggagaaaggaggcaatatgaaggaagttttccgccgcttctgcgtgggcctgcagaagattgaggagatcttcaagaaggctggtcaccccttcatgtggaacgagcacctgggctacgtgctcacctgcccctccaacctgggcaccgggctgcgcggaggcgtgcacgtgaagctggcgaacctgagcaagcaccccaagtttgaggagattctcacccgccttcgtctgcagaagcgcggcacaggtggcgtggacaccgctgcggtgggcgccgtgttcgacatctccaacgccgatcggctgggctcttccgaggtcgaacaggtgcagctggtggtggatggcgtaaagcttatggtggagatggagaagaagctggaaaaaggccagtccatcgacgacatgatccctgcgcagaagtaggcgccgcacagagcgcaccagtcagcggcttgcagctggagccccgccccctggaagtccaaccaaccgactttgccctctgggttctggccaatgagaacctgcctctccggggccccgcccgcctgctggaactcctgcacttgggcgctgcttccccacgccctgccttaaataaaagtycgtggtggtctt

SEQ ID NO: 153 - DNA, 8048 bp, rat
  misc_feature (2005)..(2005): n is a, c, g, or t
  misc_feature (3503)..(3503): n is a, c, g, or t
gaattcggcccaggataaacagatatataggtaaatgactggatagatacatggatttgatctctaactcaacttaggcaccatagaaaacaatccttgaattattttaataattttaaatcctagtttactgagaaacacgttgacgaggcagggcttcagcctctctgaagcagcactgcccctctgtggccacacaggaagtcttcactcagcagtttcctgacttaaggcctaggcctgaggaaatgcattgaatatttctctgggggacaatagttctgagaaggaaagagagtttgtctatgttgaggtcagttaaggatggttttctttccttccctcccagccttttctccatgcaacatcatgagtccccatctttctatcctgcctaaaaccacttccttctgggaaatgagaaaatccactcatacaaaatggaaacatcccgaggatcccggcccgcagcagctctctgcccccagaccctgtgagagagagacccaaccgcctggtcaggtgggcactcctgaggctgcagagggaagagaccaccaacactgctcacccctgcccacatccctggcccaagaggaaactgtataaggcctctgggtcctgtgggggagggcccaggagcggcaggacccctgtgcctgagagaccaccaccagaaccagaaggaaacagaccggataaacagttctctgcaccaaatcccgtggagggagagctgaaccttcagagagaaagacaagcctgggaaaccagaagagactgctctctgcacacacatctcggacgccagaggaaaaagccaaagaccatctggaaccctggtgcactgaagctcccggaaatggtgcacaggtcttcctggttgctgccgctgcagagagcccgtggtagcaccccacgagcgaacttgagcctcaggaccacaggtaagaccaacttttctgctgcaagaaagctgcctggtgaactcaagacacaggcccacaggaacagctgaagacctgtagagaggaaaaaccacacgccggaaagcagaacactctgtccccataactgactgaaagagaggaaaacaggtctacagcactcctgacacacaggcttataggacagtctagccactgtcagaaatagcagaacaaagtaacactagagataatctgatggcgaaaggcaagcgcaggaacccaagcaacagaaaccaagactacatggcaccatcggagcccaattctcccatcaaaacaaacatggaatatccaaacacaccagaaaagcaagatctagttccaaaatcatttttgatcatgatgctggaggacttcaagaaagacgtgaagaactccttagagaacaagtagaagcctacagagaggaatcgcaaaaatgcctgaaagaatcgcaaaaatccctgaaagaattccaagaaaacataaataaacaagtagaagcccatagagaggagacacaaaaatccctgaaagaattccaggaaaacataaataaacaagtagaagcccatagagaggagacacaaaaatccctgaaagaattccaggaaaacataaataaacaagtagaagcccatagagaggagacacaaaaatccctgaaaggaattccaggaaaacacaatcaaacagttgaaggaattaaaaatggaaatagaagcaatcaaaaaagaacacatggaaacaaccctggatatagaaaaccaaaagaagagacaaggagctgtagataaaagcttcaccaacagaatacaagagatggaagagagaatctcaggagcagaagattccatagaaatcattgactcaactgtcaaagataatgtaaagcggaaaaagctactggtccaaaacatacaggaaatccaggactcaatgagaagatcaaacctaaggataataggtatagaagagagtgaagactcccagctcaaaggaccagtaaatatcttcaacaaaaccatagaagaaancttccctaacctaaaaaaagagatacccatagacacacaagaagcctacagaactccaaatagattggaccagaaaagaaacacctcccgtcacataattgtcaaaacaccaaacgcacaaaataaagaaagaatattaaaaacagtaagggaaaaaggtcaagtaacatataaagggagacctatcagaatcacaccagacttctcgccagaaactatgaaggccagaagatcctggactgatgttatacagaccctaagagaacacaaatgccagcccaggttactgtatccagcaaaactctcaattaacattgatggagaaaccaagacattccatgacaaaaccaaatttacacaatatctttccacaaatccagcactacaaaggataataaatggtaaagcccaacataaggaggcaagctataccctagaagaagcaagaaactaatcgtcttggcaacaaaacaaagagaatgaaagcacacaaacataacctcacatccaaatatgaatataacgggaagcaataatcactattccttaatatctctcaacatcaatggcctcaactccccaataaaaagtcatagattaacaaactggatacacaacgaggaccctgcattctgctgcctacaggaaacacacctcagagacaaagacagacactacctcagagtgaaaggctggaaaacaaatttccaagcaaatggtcagaagaagcaagctggagtagccattctaatatcaaataaaatcaatttccaactaaaagtcatcaaaaaagataaggaaggacacttcatattcatcaaaggaaaaatccaccaagatgaactctcaatcctaaatatctatgccccaaatacaagggcacctacatacgtaaaagaaaccttactaaagctcaaagcacacattgcacctcacacaataatagtgggagatttcaacacaccactctcatcaatggacagatcatggaaacagaaattaaacagtgatgtcgacagcataagagaagtcatgagccaaatggacttaacggatatttttagaacattctatcctaaagcaaaaggatataccttcttctcagctcctcatggcactttctccaaaattgaccatataattggtcaaaaaacgggcctcaacaggtacagaaagatagaaataatcccatgcgtgctatcggaccaccacggcctaaaactggtcttcaataacaataagggaagaatgcccacatatacctggaaattgaacaatgctctactcaatgataacctggtcaaggaagaaataaagaaagaaattaaaaactttttagaatttaatgaaaatgaaggtacaacatacccaaacttatgggacacaatgaaagctgtgctaagaggaaaactcatagcgctgagtgcctgcaaaaagaaacaggaaagagcatatgtcagcagcttgacagcacacctaaaagctctagaacaaaaangaagcaaatacactgaggaggagtagaaggcaggaaataatcaaactcagagctgaaatcaaccaagtagaaacaaaaaggaccatagaaagaatcaacagaaccaaaagctggttctttgagaaaatcaacaagatagataaacccttagccagactaacgagaggacacagagagtgtgtccaaattaacaaaatcagaaatgaaaagggagacataactacagattcagaggaaattcaaaaaatcatcagatcttactataaaaacctatattcaataaaacttgaaaatcttcaggaaatggacaatttcctagacagataccacgtatcgaagttaaatcaggaacagataaaccagttaaacaaccccataactcctaaggaaatagaagcagtcattaaaggtctcccaaccaaaaagagtccaggtccagacgggtttagtgcagaattctatcaaaccttcatagaagacctcataccaatattatccaaactattccacaaaattgaaacagatggagcactaccgaattccttctacgaagccacaattactcttatacctaaaccacacaaagacacaacaaagaaagagaacttcagaccaatttcccttatgaatatcgatgcaaaaatactcaataaaattctggcaaacgaattcaagagcacatcaaaacaatcatccaccatgatcaagtaggcttcatcccaggcatgcagggatggtttaatatacggaaaaccatcaacgtgatccattatataaacaaactgaaagaacagaaccacatgatcatttcattagatgctgagaaagcatttgacaaaattcaacacccttcatgataagagtcccggaaagaataggaattcaaggcccatacctaaacatagtaaaagccatatacagcaaaccagttgctaacattaaactaaatggagagaaacttgaagcaatcccactaaaatcagggactagacaaggctgcccactctctccctacttattcaatatagttcttgaagttctagccagaccaatcagacaacaaaaggagatcaaggggatacagatcggaaaagaagaagtcaaaatatcactatttgcagatgacatgatagtatatttaagtgatcccaaaagttccaccagagaacgactaaagctgataaacaacttcagcaaagtggctgggtataaaattaactcaaataaatcagttgccttcctctatacaaaagagaaacaagccgagaaagaaattagggaaacgacacccttcataatagacccaaataatataaagtacctcggtgtgactttaaccaagcaagtaaaagatctgtacaataagaacttcaagacactgaggaaagaaattgaagaagacctcagaagatggaaagatctcccatgctcatggattggcaggattaatatagtaaaaatggccattttacccaaagcaatctacagattcaatgcaatccccatcaaaataccaatccaattcttcaaagagttagacagaacaatttgcaaattcatctggaataacaaaaaacccaggatagctaaagctatcctcaacaataaaaggacttcagggggaatcactatccctgaactcaagcagtattacagagcaatagtgataaaaactgcatggtgattggtacagagacagacagatagaccaatggaatagaactgaagacccagaaatgaacccacacacctatggtcacttgatttttgacaaaggagccaaaaccatccaatggaaaaaagatagcattttcagcaaatggtgctggttcaactggagggcaacatgtagaagaatgcagatcgatccatccttatcaccctgtacaaagcttaagtccaagtggatcaaggacctccacatcaaaccagacacactcaaactaatagaagaaaaactagggaagcatctggaacacatgagcactggaaaaaatttcctgaacaaaacaccaatggcttatgctctaagatcaagaatcgacaaatgggatctcataaaactgcaaagcttctgtaaggcaaaggacactgtggttaggacaaaacggcaaccaacagattgggaaaagatctttaccaatcctacaacagatagaggccttatatccaaaatatacaaagaactcaagaagttagaccgcaggaaacaaataaccctattaaaaatggggttcagagctaaacaaaaattcacagctgaggaatgccgaatggctgagaaacacctaaagaaatgttcaacatctttagtcataagggaaatgcaaatcaaaacaaccctgagatttcacctcacagtagtgagaatggctaagatcaaaaactcaggtgacagcagatgctggcgaggatgtggagaaagaggaacactcctccattgttggtgggattgcagactggtaaaaccattctggaaatcagtctggaggttcctcagaaaattggacattgaactgcctgaggatccagctatacctctcttgggcatatacccaaaagatgcctcaacatataaaagagacacgtgctccactatgttcattgccgccatatttataatagccagaaactggaaagaacccagatgcccttcaacagaggaatggatacagaaaatgtggtacatctacacaatggaatattactcagctatcaaaaacaacgagtttatgaaattcgtaggcaaatggttggaactggaaaatatcatcctgagtgagctaacccactcacagaaagacatacatggtatgcactcattgataagtggctattagcccaaatgcttgaattaccctagatccctagaacaaacgaaactcaagacggatgatcaaaatgtgaatgcttcactccttctttaaatgaggaaaaagaatacccttggctgggaagggagaggcaaagattaaaacagagactgaaggaacacccattcagagcctgccccacaggtggcccatacatatacagccacccaattggacaagatggatgaagcaaagaagtgcagactgacaggagccggatgtagatcgctcctgagagacacagccagaatacagcaaatacagaggcgaatgccagcagcaaaccactgaactgagaataggtcccccgttgaaggaatcagagaaagaactggaagagcttgaaggggctcaagaccccaaaagtacaacaatgtcaagcaaccagagcttccagggactaagccactacctaaatactatacatggactgaccctggactctgaccccataggtagcaatgaatatcctagtaagagcaccagtggaaggggaagccctgggtcctgctaagactggacccccagtgaactagactatggggggagggcggcaatggggggagggttgggagggggacacccataaggaaggggaggggggagggggatgtttacccggaaaccgaaagggaataacacttaaattatataagaaatactcaagttaattaaaaataataataataataataaaaagaattactcataaaataaagacaagatgatggataaaattaaaaaaacaaaaaaaacaaaaaaaaaccaaaatggaaacatgaaaatgctcactacttacaatagtgctttatgtaataagcaaatgactgcatttgacacgagttataatttattaaccccttagttagactacttgtacacatggtgattattaatccacaattattctttttcactaaaatccttatattttattctttgagattataatataatcacacaaattccctcttccctgtcatctcttcaaaaccttccatatagtcctccatgctgtcttttgaacgttatggcttcttttttatattcttgttttatattatatatatataatatatattataatatatatcatactatatatattcctcaggactgaccaatccatattggataaccaattggtgtgctcgtctcagggaaagaccatttccccaccatcagcattctcggtttccagtagttcattgtctagaatggagactgtgtgtgctttccccgtccactttagctgctgtgtttcagctcctcttgaggcagttatgttggtgagacctcatctgtgcggcttccaacattcctcagagacacagtgagttacacagtgtcacctgatcctctaactcccaccatctttcctgctgtcttctccagggtttcctgaacctcagcaggagcaggggttgtactgtagacacgcccaccttcactaggatccacagctcctcactttgatttgctgtggttttctgcaatggcttccatgtcctagtaaagtcatggagaccccataaccacgctgtactaaaccagacaatccctagctgcattctaagttcttgtccttatcccatacatgtgcatttagagagtctgcttattttgctcattatagaacgagtcaatcattctctttgagttgtaaaagctt

SEQ ID NO: 154 - DNA, 1840 bp, rat
ggagccggagtcgccgccgcccgagcgcagccgagcgcacgccgagcccaatcgccaccgccatggccaccacggtgacctgcacccgtttcacggacgagtaccagctatacgaggatattggcaagggggctttctctgtggtccgacgctgtgtcaagctctgcaccggccatgagtatgcagctaagatcattaacaccaagaagctgtcagctagagatcaccagaagctggagagggaggctcggatctgccgcctgctgaagcattccaacattgtacgcctccatgacagcatctctgaagagggcttccactacctggtcttcgacctggtcactggtggggagctctttgaagacattgtggcgagagagtactacagtgaggctgacgccagtcactgtatccagcagatcctggaggctgttctccattgtcaccaaatgggggtcgtccacagagacctcaagcctgaaaacctgctcctggccagcaaatgcaaaggggccgcagtgaaactggcagacttcggcctggccatcgaggttcagggagaccagcaggcatggtttggatttgcgggaacaccaggctacctgtctcccgaagttcttcggaaggaggcctatggcaaaccagtggatatctgggcatgtggggtgatcctgtatatcctgctggtgggatacccacctttctgggatgaggaccagcacaagctgtaccagcagatcaaggctggggcctatgacttcccatcccccgagtgggacaccgttacccctgaagccaaaaacctcatcaaccagatgttgaccatcaaccccgccaagcgcatcacggcccacgaggccctgaagcacccatgggtctgccaacgatccacggtggcctccatgatgcacagacaggagactgtggaatgtctgaagaagttcaatgcaaggaggaagctcaagggagccatcctcaccactatgctggccacacggaatttctcagtgggcagacagaccaccgctccggccacaatgtccaccgcggcctccggcaccaccatggggctggtggaacaagccaagagtttactcaacaagaaagcagacggagtcaagccccagacaaacagcaccaaaaacagctcggccatcaccagccccaaaggatccctccctcctgccgccctggagcctcaaaccaccgttatccataacccagtggacggcattaaggaatcttccgacagcaccaacacaaccatagaggacgaagatgccaaagcccggaagcaggaaatcatcaagaccacagagcagctcatcgaggccgtcaacaacggcgactttgaggcctatgcgaaaatctgtgacccaggcctgacctcatttgagcctgaagctctgggcaacctggtcgaagggatggatttccacagattctactttgagaacctgctggccaagaacagcaagccgatccacaccactatcctgaacccgcacgtgcacgtcatcggcgaggatgcagcctgcatcgcttacatccgcctcacacagtacatcgacggccagggcagaccccgcaccagccagtccgaagagacccgtgtgtggcaccgccccgacggcaagtggcagaatgtccatttccactgctcgggcgctccagtggccccactgcagtgagagctgcgcctggtttcaccggacagagttggtgtttggagcccagccgccctcgggcgcacggcctgcctgtcgcatgtttgtgtctgcctcgtcccctcccctggtgcctgtgtctgcagaaaaacaagaccagatgtgatttgttt

SEQ ID NO: 155 - DNA, 2130 bp, rat
ttttctccgagttttctgaactctggctcatgatcgggcttactggatacgagaatcctggaggaccgtaccctgatttccatctacctctgactttgagcctttctaacccggggctcacgctgccaacacccgggccacctggtccgatcgtcttacttcattcaccagcgttgccaattgctgccctgtccccagccccaatgggggagtgagagaggccactgccggccggacatgggtctccccatcgtgcctggcctgctgctgtcactggtgctcctggctctgctgatggggatacacccatcaggggtcaccggactggttccttctcttggtgaccgggagaagagggataatttgtgtccccagggaaagtatgcccatccaaagaataattccatctgctgcaccaagtgccacaaaggaacctacttggtgagtgactgtccaagcccagggcaggaaacagtctgcgaggtgtgtgataaaggcacctttacagcttcgcagaaccacgtcagacagtgtctcagttgcaagacatgtcggaaagaaatgttccaggtggagatttctccttgcaaagctgacatggacaccgtgtgtggctgcaagaagaaccaattccagcgctacctgagtgagacgcatttccagtgtgtggactgcagcccctgcttcaatggcaccgtgacaatcccctgtaaggagaaacagaacaccgtgtgtaactgccacgcaggattctttctaagcggaaatgagtgcaccccttgcagccactgcaagaaaaatcaggaatgtatgaagctgtgcctacctccagttgcaaatgtcacaaacccccaggactcaggtactgccgtgctgttgcctctggttatcttcctaggtctttgccttttattctttatctgcatcagtctactgtgccgatatccccagtggaggcccagggtctactccatcatttgtagggattcagctcctgtcaaagaggtggagggtgaaggaattgttactaagcccctaactccagcctctatcccagccttcagccccaaccccggcttcaaccccactctgggcttcagcaccaccccacgcttcagtcatcctgtctccagtacccccatcagccccgtcttcggtcctagtaactggcacaacttcgtgccacctgtaagagaggtggtcccaacccagggtgctgaccctctcctctacggatccctcaaccctgtgccaatccccgcccctgttcggaaatgggaagacgtcgtcgcggcccagccacaacggcttgacactgcagaccctgcgatgctgtatgctgtggtggatggcgtgcctccgacacgctggaaggagttcatgcggctcctggggctgagcgagcacgagatcgagcggctggagctgcagaacgggcgttgcctccgcgaggctcattacagcatgctggaagcctggcggcgccgcacaccgcgacacgaggccacgctggacgtagtgggccgcgtgctttgcgacatgaacctgcgtggctgcctggagaacatccgcgagactctagaaagccctgcccactcgtccacgacccacctcccgcgataaggccacacccccacctcaggaacgggactcgaaggaccatcctgctagatgccctgcttccctgtgaacctcctctttggtcctctagggggcaggctcgatctggcaggctcgatctggcagccacttccttggtgctaccgacttggtgtacatagcttttcccagctgccgaggacagcctgtgccagccacttgtgcatggcagggaagtgtgccatctgctcccagacagctgagggtgccaaaagccaggagaggtgattgtggagaaaaagcacaatctatctgatacccacttgggatgcaaggacccaaacaaagcttctcagggcctcctcagttgatttctgggcccttttcacagtagataaaacagtctttgtattgattatatcacactaatggatgaacggttgaactccctaaggtaggggcaagcacagaacagtggggtctccagctggagcccccgactcttgtaaatacactaaaaatctaaaagtg

SEQ ID NO: 156 - DNA, 2909 bp, rat
gaattccggggcggcggccgcggggatcccgcgagcggcccctgaacatctacccttcttgccgggacccgggaggtccccactggcctccgggcccgtcctgatcagactcgtgtcgacctccccgtccacgcgcatccgggagagccgcgccacgagacggacccgggcccgccgggacccctggtgtctggccctgcgtcgagaggctggtgactgccacccataagctccagcttcagcctcggcttactcccctcaggggcttgcaggctgaggcctgccctcggacgcggctgaccagcctctccctctcttccacactttggacttctctttggacctcctaaaaaggctccatcatggcaccgttcctgcgcatctccttcaattcctatgagctgggctccctgcaggcggaggacgacgcaagccagcctttctgtgccgtgaagatgaaggaggcactcaccacagaccgagggaagactctggtacagaagaagcccaccatgtaccctgagtggaagtcaacattcgacgcccacatctatgaaggccgtgtcatccagatcgtgctgatgcgggcagctgaagaccccatgtcggaggtgaccgtgggcgtgtcagtgctggctgagcgctgcaagaagaacaacggcaaggctgagttctggctggacctgcagcctcaggccaaggtgctgatgtgtgtgcagtatttcctggaggatggggattgcaaacagtccatgcgtagtgaggaggaggccatgttcccaactatgaaccgccgtggagccattaaacaggccaagattcactacatcaagaaccacgagttcatcgccaccttctttgggcagcccaccttctgttctgtgtgcaaagagtttgtctggggcctcaacaagcaaggctacaaatgcaggcaatgcaacgctgccatccataagaaatgcatcgacaagattatcggccgctgcactggcactgctaccaatagccgggacaccatcttccagaaagaacgcttcaacatcgacatgcctcaccgattcaaggtctataactacatgagccccaccttctgtgaccactgtggcactttgctctggggattggtgaaacagggattaaagtgtgaagactgcggcatgaatgtgcaccacaaatgccgggagaaggtggccaacctgtgtggtatcaaccaaaagctcttggctgaggccttgaaccaagtgacccagaaagcttcccggaagccagagacaccagagactgtcggaatataccagggattcgagaagaagacagctgtctctgggaatgacatcccagacaacaacgggacctatggcaagatctgggaggggagcaaccggtgccgccttgagaacttcaccttccagaaagtacttggcaaaggcagctttggcaaggtactgcttgcagaactgaagggcaaggaaaggtactttgcaatcaagtacctgaagaaggacgtggtgttgatcgacgatgacgtggagtgcaccatggtggagaagcgggtgctggcgctcgcctgggagaatcccttcctcacccatctcatctgtaccttccagaccaaggaccacctcttctttgtgatggagttcctcaatgggggcgatctgatgttccacattcaggacaaaggccgcttcgaactctaccgggctacgttttatgcagctgagatcatctgcggactgcagtttctacatggcaaaggcatcatttacagggacctcaagctagacaatgtaatgctggacaaggatggccacatcaagattgctgacttcgggatgtgcaaagagaatatatttggggagaaccgggccagcacattctgcggcactcctgactacatcgcccctgagatcctgcagggcctgaagtactcattttccgtggactggtggtcttttggggtcctcctctatgagatgctcattggccagtcccccttccatggtgatgatgaggacgagctctttgagtccatccgggtggacacaccacactacccgcgctggatcaccaaggagtccaaggacatcatggagaagctcttcgagagggaccctgccaagaggctgggagtaacaggaaacatcaggcttcacccctttttcaagactatcaactggaacctgctggagaagcggaaggtggagccgccctttaagcccaaagtgaaatccccttcagactacagcaactttgacccagagttcctgaatgagaaaccccaactttccttcagtgacaagaacctcatcgactctatggaccagacagccttcaagggcttctcctttgtgaaccccaaatatgagcaattcctggaatagtgagctcccagacctgcttttaatgccccggcagagtaggcccatctgccctggtttgcatcctcactgcccatgaagaagagtgggtgactggtgattcctgctgctgccccctcttcctcggagagtctggctcctgttggctgggctcacagtacttcctctgtgaactgtttgtgaatttgccttccttttgccatcggagggaaactgtaaatcctgtgtgtcattacttgaatgtagttattgaaatatatattatatatatgcacatatatataataggctgtatatattgctcagtatagaaagcatgtaggagactggtgatgtgttgacctttttttaaaaaaaaccatatgtatacgtgtgtatgtatacatctacacacgtatacatatatgtatgtatgtatgtatgtatgtatgtatatatgaccaaaagaaaagagagcacaagctacctgaaccacaggattgtttatgtgtgtataaataaacactgaatggtaaaaaaccggaattc

SEQ ID NO: 157 - DNA, 1782 bp, rat
cagcgccaccagtccctctgactgagacctcggctctagagttcctgcccagcaaataccctcaacccagagccagagcccccacagtgccagcccgtccctcactcaggcagaatgggcaaggagaagacacacatcaacattgtggtcattggccacgtggactcaggcaagtctaccacgacaggccatctcatctacaaatgtggcggcatcgacaagcggaccatcgagaagtttgagaaggaggcagcagagatggggaagggctcctttaaatatgcctgggtgctggacaagctgaaggcagagcgggagcgcggcatcaccatcgacatctccctctggaagtttgagaccaccaagtactacatcaccatcattgatgctccaggccaccgggacttcatcaagaacatgattactggcacatcccaggccgactgtgcagtactgatcgtggcagcgggcgtgggcgagtttgaggcgggcatctccaaaaacgggcaaacccgggaacacgcactcctggcctacactctgggtgtgaaacagctcattgtgggtgtcaacaagatggactccacggaaccagcctacagcgagaagcgctacgatgagattgtcaaggaggtcagcgcctacatcaagaagatcggctacaacccagccacggtgcccttcgtgcccatctcgggctggcacggtgacaacatgctggaaccttcacctaatatgccatggttcaagggctggaaagtagagcgtaaggaaggaaatgcaagcggcgtgtccctgctggaagccctggacacaatcctgccccccacccgccccaccgacaagccccttcgtctaccgctgcaggatgtatacaagattggtggcattgggactgtacctgtgggcagagtggagaccggtatcctccgtcctggtatggtggtgacctttgcgccagtcaacatcaccacagaggtgaagtctgtggaaatgcaccacgaggcgctcagcgaggccctgcctggtgacaatgttgggttcaacgtgaagaatgtgtctgtcaaggacattcgccggggcaatgtctgtggggacagcaaagctgacccccctcaggaggccgcccagttcacctctcaggttatcatcctgaaccaccctgggcaaatcagcgctggctactcgccagtcatcgactgtcacacagcccacatcgcctgcaagtttgccgagctaaaggagaagattgaccgtcgctctggcaagaagctggaggacaatcccaagtccctgaagtctggggatgccgccattgttgagatggtcccaggaaaacccatgtgtgtggagagcttctcacagtacccacccctcggccgcttcgccgtggccgacacgaggcagactgtggccgtgggcgtcatcaagaacgtggagaagaagagcggcggcgccggcaaggtcaccaagtccgcacagaaggcgcagaaagcgggcaagtgaaggccgggcgcccgcgcgtggccctccccaacggcgccgcgccgcccccagccccgcccccggcactggccccgtcccctcccccgccccagggcggcccctccgccccgcccccccgccaggcgcatgtctgcacctccgcttgtaagaggctctacgtcagcgactggatgctcgccatcaaagtccagtggaaattcttcaagaggaaaagcgcccccaccccaggcttccgcgccagtgctgaccacgctcagtgcccgttttcccaataaa

SEQ ID NO: 158 - DNA, 2024 bp, rat
caatttgctgagcctgtcacctttgttccaggagccaaaccagcaatgtcttcccctgcacagcctgcagttcctgccccactggccaacttgaagattcaacacaccaagatctttataaacaatgaatggcacaactcattgaatggcaagaaatttcctgtcattaaccctgcaactgaagaggtcatctgccatgtggaagaaggggacaaggcagatgttgacaaagctgtgaaggctgcaagacaggctttccagattggctccccctggcgcaccatggatgcttcagagagaggatgcctgctgaacaagctggctgacttaatggagagagatcgcgtgctgctggctacaatggaatcaatgaatgctggaaaaatctttactcatgcataccttttggatacagaggtcagcataaaagccttaaagtactttgcaggctgggcagacaagattcatggccaaacaattccaagtgatggagatgttttcacttatacaagacgtgaacctattggggtgtgtggccaaatcattccttggaatggtccgttgattttattcatttggaagataggcgctgcccttagctgtgggaacactgtgattgtgaagccagcagagcaaactcctctcacagctctttacatggcatctttaataaaagaggcagggtttcctcctggtgtggtgaacgttgtccctggttatggatcaactgcaggggcagccatctcttctcacatggacatagacaaggtgtctttcacaggatcaacagaggttggcaaattaatcaaagaagctgcagggaaaagcaatctgaagagggtcaccctggagcttgggggaaagagcccttgcattgtgtttgcagatgctgacttggatagtgctgttgagtttgcacaccaaggagtattcttccaccagggtcagatttgtgtcgcagcatccagactttttgttgaggagtccatttacgatgaatttgttaggaggagtgtggagcgggctaagaaatacgttctaggaaatcctctggactcaggaataagtcaaggtcctcagattgacaaggagcaacatgctaaaatccttgatctcattgagagtgggaagaaagaaggcgccaaactggagtgtggtggaggacgctgggggaacaaaggcttctttgtccagcctacagtcttctccaatgtgaccgatgagatgcgcattgccaaagaggagatatttggaccagtgcaacaaatcatgaagtttaagtccatagatgaggtgatcaagagagccaacaatactccctatggtctagcagcaggagtcttcacaaaagacctggacagggccatcactgtgtcttctgctctgcaggccgggacagtgtgggtgaattgttatttgactctctctgtccagtgcccatttggtgggttcaagatgtctggaaatgggcgagaaatgggtgaacagggtgtttatgaatacactgagctcaagacagtcgcaatgaaaatatctcagaagaactcctaaagaagccagcagagtgacgagaaactctcagcagtagctacatgtctcctacaatcaccagcagagggttgttttattacagggtcttctgttgatttcttaaacataaggaatccatcagcattactgtaactcatagaaaatgtatagtttaattcttctaatacatgaccctaatacatacccaagaagaaagggatacatttaggtacatgctctttgtaacccagtcatgaaaaagtgcttttcattgtagctacttgtctacagccctcatttgatgtgatttaaactctgtttctcggtgacttcttgccactactcaccatgcacaactgaaaagtcagccactgttcttggagttattgttctgagtattgtgaaatatttttagaatgacatacctgcttgtcaaatgaaatgcttagctgtaattagagtgcaaagtttaataaaggcaaaatctcacatga

SEQ ID NO: 159 - DNA, 878 bp, rat
ggcacgagcagagagattgtcccaacagagaggcaattctattccctaccaacatgaagctgttgctgctgctgctgtgtctgggcctgacactggtctgtggccatgcagaagaagctagttccacaagagggaacctcgatgtggctaagctcaatggggattggttttctattgtcgtggcctctaacaaaagagaaaagatagaagagaatggcagcatgagagtttttatgcagcacatcgatgtcttggagaattccttaggcttcaagttccgtattaaggaaaatggagagtgcagggaactatatttggttgcctacaaaacgccagaggatggcgaatattttgttgagtatgacggagggaatacatttactatacttaagacagactatgacagatatgtcatgtttcatctcattaatttcaagaacggggaaaccttccagctgatggtgctctacggcagaacaaaggatctgagttcagacatcaaggaaaagtttgcaaaactatgtgaggcgcatggaatcactagggacaatatcattgatctaaccaagactgatcgctgtctccaggcccgaggatgaagaaaggcctgagcctccagtgctgagtggagacttctcaccaggactctagcatcaccatttcctgtccatggagcatcctgagacaaattctgcgatctgatttccatcctctgtcacagaaaagtgcaatcctggtctctccagcatcttccctaggttacccaggacaacacatcgagaattaaaagctttcttaaatttctcttggccccacccatgatcattccgcacaaatatcttgctcttgcagttcaataaatgattacccttgcactt

SEQ ID NO: 160 - DNA, 1603 bp, rat
cacctcctacagctgccacaagcagctctcttcccccaccatgagagctgtccctctgcacctcgtcgggacagcaagcctcacccttggcttcttgctcctgctatctctccgcctggacccaggccaagccaaggagttgaagtttgtgacattggtgttccggcatggagaccgaggtcccatcgagacctttcctaatgaccccattaaggaatcctcgtggccacaaggatttggccaactcaccaagtggggcatgggacagcactacgaactcggaagttatataaggagaagatacgggagattcttgaacaactcctataaacatgaccaggtttatatccgaagcacagatgttgacaggactctgatgagcgctatgacaaacctcgcagccctgtttccccctgaggggatcagcatctggaatcccagactgctctggcagcccatcccagtgcacaccgtgtctctctctgaggatcggttgctatacctgcctttcagggactgtcctcgctttcaagaactcaagagtgagactttaaaatctgaggagttcctgaagaggcttcaaccatataaaagcttcatagacaccttgccatcgctgtcgggattcgaggaccaggatctttttgaaatctggagtaggctttacgaccctttatattgcgagagtgttcacaatttcaccttccgcacctgggccacagaggacgccatgactaagttgaaggagttgtcagaattatctctgttatctctttatggaattcacaagcagaaagagaaatctagactccaggggggcgtcctggtcaatgaaattctcaagaacatgaagcttgcaactcaaccacagaaggccaggaagttgatcatgtattctgcatatgacactactgtgagtggcctgcagatggcgctagagctttataatggacttctacctccctacgcttcctgccacataatggaattgtaccaggataatggggggaccttcgtggagatgtactaccggaatgagacccagaacgagccctacccactcacgctgccgggctgtacccacagctgccctctggagaagtttgcagagctactggaccccgtgatcccccaggactgggccacagagtgtatgggcacaagcaaccaccaagcgtcgctgtaaaagaacaaccagttgccagtgtaatcaggaaaagagttaggtcaaacttgtgggtctgccggggatccatgattagcacaaagaactctattgctgaaggattcgaagattttgcttgagcgggtgagtaaagctgccctgggaatgtctgatgtaaaaacaggtttcagacgaagcctaccaagttagcgtgcaagcatgaaaaagaagacacttatcccaggctaatgggcaaaggacctgattcacctgacaacaacgctcacctgttcccctgccttctctcacgaggcaaaaagatgagacaggaggacacctggaggagttttccatacccagcctagaacgatcagattttatatgtatgtcaaaagacgctgggtagcagaactgaataataaaagcctcttggtgtcc

SEQ ID NO: 161 - DNA, 2275 bp, rat
tcccagtcacaatgcctctgttcaaacttacaggtcaaggaaaacaaattgatgatgcaatgcgtagctttgctgaaaaagtatttgcctcagaagtcaaagatgagggaggtcggcacgagatctcccccttcgacgtggatgagatctgcccaatttcccttcgtgagatgcaggcccacatattccacatggagaacctgtccatgtccatggatggcaggaggaaaaggcgcttccaaggacggaagactgttaatttgtccattccgcaaagtgaaacgtcttctaccaaactgtcccacattgaagaatttatttcttcatccccgacctatgagagtgtgcctgacttccagagggtgcagatcactggtgactatgcctctggggtaactgttgaagactttgaggtggtttgtaaaggtctctatcgggctttgtgtatacgagagaaatacatgcagaagtcattccagaggttccccaagaccccctccaagtacctgaggaacatcgacggcgaagctttggtagcaatcgaaagcttctatccagtatttacccctcctccgaagaagggagaagacccctttcgcagagaagaccttcccgcaaacctgggctatcacctcaagatgaagggtggtgtgatttacatctaccctgatgaagcagcagccagcagagatgagcccaagccctacccttacccaaatctggatgacttcctggatgacatgaattttttgcttgctctaattgcacaagggcctgtgaagacttacactcaccgccgtctgaagttcctctcctccaagttccaggtccatcagatgctgaatgagatggacgagctaaaggagctgaagaacaacccccaccgggacttttataactgcaggaaggtggatactcacatccacgcagctgcctgcatgaaccagaagcacctgctgcgctttattaagaaatcttaccatattgatgctgacagagtggtctacagcaccaaagagaagaacctgaccctgaaggaactttttgctcaattaaatatgcatccatatgacctgactgttgactctctggatgttcatgctggacggcagacgttccaacgcttcgataagttcaatgacaaatacaatccggtgggtgcgagtgagcttcgggacctctacctaaaaacagacaactacattaacggagagtattttgccactatcatcaaggaggtgggtgcagacctggtggacgccaagtatcagcatgcggagccccgcttgtccatctacggtcgcagtccagatgagtggagcaaactctcctcttggtttgtcggcaaccgtatttattgccccaacatgacatggatgatccaagtccccaggatctatgatgtgttccgatccaagaatttcctgccacactttggaaagatgctggagaatattttccttccagtgtttgaggccaccatcaacccccagactcatccagacctcagtgtcttcctcaagcatatcactggctttgacagtgtggatgatgagtccaaacacagtggtcacatgttttcctccaagagtcccaaacctgaggagtggacaatggaaaacaacccgtcttacacatattatgcctactacatgtatgcaaacatcatggtgctcaactgcctgagaaaggaacgaggcatgaatacatttttgtttcgcccccattgtggtgaggctggggctctcactcacctcatgacagcctttatgatagcggacaatatttcgcacggcctgaacttaaagaagagtcctgtgttacagtacctatttttcttagcccagatccccattgcaatgtcgccattgagtaacaacagcctgttcctcgaatatgcaaaaaaccctttcttagatttcctccagaaaggcctcatgatctcgctgtcgaccgatgacccgatgcagttccatttcaccaaggagcccctgatggaagagtacgccatcgcagcccaggtcttcaagctgagcacttgtgacatgtgtgaggtggcaaggaacagtgtcctgcagtgtggaatttctcatgaggaaaaagcaaagtttctgggcaacaattaccttgaggaaggtcctgttggaaatgacatccgaaggacaaatgtggctcagattcgcatggcctatcgttatgaaacttggtgttatgaactcaatttgattgctgagggccttaaatcaacagaatgaataaagtatgtgaaccgaaa

SEQ ID NO: 162 - DNA, 1769 bp, rat
gcaagtttcggggtgagctgtgaggtgtaatcacctagatcagaccattttactttgacaacttaggagtcagatttttaaaagctgattttgcccaatgcttctgaaagcaataccaggacattcaattttaagtagtactgatattgaaacctacatcactgcctaggagatttaaagcgagtggtacctttgttgaaagctaaagcttaaggttggccatgggatttatttgtttgtctttttgtttttcaaagcagggtttcactatgttaccttggctgtcctggaactgaatttgtagaccaggctggcctcaggcttgcagagatctacctacctctgcctgttttaaattgtgggattaaggcgtgtgccactgccaccaggcaaccgtgggattgttaaggttttactgtctgttcctgcccaccatccttattgctattcttactttctttgcagagtcctgtgttacagtacctatttttcttagcccagatccccattgcaatgtcgccattgagtaacaacagcctgttcctcgaatatgcaaaaaaccctttcttagatttcctccagaaaggcctcatgatctcgctgtcgaccgatgacccgatgcagttccatttcaccaaggtaggcatggaagtttaaacaacgccagcacgtgatcactcgccacccagaaactgagagtcaaaccaaggctcttctgaatcctttgtgtagggcgtgtattgttcctttcactaatgcaactcctgatttatgtgactaactacaggagcccctgatggaagagtacgccatcgcagcccaggtcttcaagctgagcacttgtgacatgtgtgaggtggcaaggaacagtgtcctgcagtgtggaatttctcatgaggtagacttgaccgcactcactgctctcctgagtgttgggtctagcaatctgaccactgaatcgttagtgaagcgaggaaaacacaggaaagtactgtataaaccgcttaccgctgctatggatagggactggaagaccatcctgggctggggtatggttcagtggtagggcacaagcctgtgaggatctaatttgagtccctgccactcctccaccaagcactattctctggccatgtctctaccattcaagttctcaggaagcgtgcacccggaggcactagatggacgaccactttttcccttttgtgtgtgggtaacatgaggattatggtggaggtgtgatcgctgcctatcccggggtaaagagacacagagccctctctttcctttgtcttacaggaaaaagcaaagtttctgggcaacaattaccttgaggaaggtcctgttggaaatgacatccgaaggacaaatgtggctcagattcgcatggcctatcgttatgaaacttggtgttatgaactcaatttgattgctgagggccttaaatcaacagaatgaataaagtatgtgaaccgaataacactgtgagtgggttttcattgagaattcgaatcctctagacttgttattgagacccttttttttttattattttcttaagatttatttatttggggttggggatttagctcagtggtagagcgcttgcctagcacagaggtcctgggttcggtgcccagctctggaaaaaaaaagaaagaaaaaaaaaagatttatttatttatcacgaacgagtgctctatctgcatgtacacctgcaggccagaagagggcatcagatcatttaaggtggttgtgagtcaccatgt

SEQ ID NO: 163 - DNA, 528 bp, rat
atggacatagccatccaccacccctggatccggcgtcccttctttcctttccactccccaagccgcctctttgaccagttcttcggagagcacctgttggagtctgacctcttctctacagccacttccctgagccccttctaccttcggccaccctccttcctgcgggcacctagctggattgacactgggctctcagagatgcgtatggagaaggacaggttctctgtgaacctggacgtgaagcacttctctccagaggaactcaaagtcaaggttctgggagacgtgattgaggtgcacggcaagcacgaagagcgccaggacgaacatggcttcatctccagggagttccacaggaagtaccggatcccagccgacgtggatcctctcaccattacttcttccctgtcatcggatggagtcctcactgtgaatggaccaaggaaacaggcctctggccctgagcgcaccattcccatcacccgtgaagagaagcctgctgtcactgcagcccctaagaagtag

SEQ ID NO: 164 - DNA, 373 bp, rat
ctgattaacaattgttctgatgatcatgatggaaacagaccacatcagaaacagaggcacgaaagtctgagcccgcacaaattcccacttcagaaacccccagggtttctacagaagtgcccttgtctaatgcaatggggatggccctgtgggttgtctctgcttgctgctgtgaccagctcagtgcctacagccaccggtggcatgagaagtgcttctctcctgctctatgccctgcatttgggatgctaagaagaggtaaggatgtgaggaagaagagatccacccttctcctaggtaggatcagctctcaatggtgcttatcactagtcatcaaagaacatggcagtcagctgcgatatccaagaagcaa

SEQ ID NO: 165 - DNA, 1840 bp, rat; identical to SEQ ID NO: 154

SEQ ID NO: 166 - DNA, 5930 bp, rat
tctgtgaaaagattaaccggagtttaagagtgataggatgacggatgcccagatggctgacttcggggcggcacgatacctccgcaagtcagagaaggagcgcctagaggcccagacccggccctttgacatccgcacagagtgcttcgtgcctgatgacaaggaggagtatgtcaaggccaagatcgtgtcccgggaagggggcaaggtcactgccgaaactgaaaacggcaagacggtgactgtgaaggaggaccaggtgatgcagcagaaccctccgaaattcgacaagatcgaggacatggccatgctgaccttcctgcatgagccagctgtgctctacaatctcaaggagcgctatgcggcctggatgatctatacctactcaggcctcttctgtgtcaccgtcaacccctataagtggctgccagtgtacaatgcggaagtggtagctgcctaccggggcaagaagaggagcgaggctccaccccacatcttctccatctctgacaacgcctatcagtacatgctgacagatcgggagaaccagtccatcctcatcactggagaatccggagcggggaagactgtcaacacgaagcgtgtcatccagtactttgctagcattgcagccataggggaccgtagcaagaaggacaatcctaatgcaaacaagggcaccctggaggaccagattatccaggctaaccctgctctggaggcctttggcaacgccaagactgtccggaatgacaactcctcccgctttgggaagttcatcaggatccactttggagccacaggaaagctggcttctgcagacatagagacctaccttctggagaagtcccgggtgatcttccagctaaaggctgagaggaactaccatatcttctaccagatcctgtccaacaagaagccggagctgctggacatgctgctggttaccaacaacccgtacgactatgccttcgtctctcagggagaggtgtctgtggcctccattgatgactccgaggagcttttggccactgatagcgcctttgatgtgctgggcttcacagcagaggagaaggccggtgtctacaagctgacaggcgccatcatgcactatgggaacatgaagttcaagcagaagcagcgggaggagcaggcggagccagacggcacagaagatgctgacaaatctgcctacctcatggggctgaactcagccgacctgctcaagggtctgtgtcaccctcgggtgaaggtgggtaacgagtatgtcaccaaggggcagagtgtacagcaggtgtactattccatcggggcactggccaagtcagtgtacgagaagatgttcaactggatggtgacacgcatcaacgcaaccctggagaccaagcagccacgccagtacttcataggtgtcctggacatcgccggctttgagatctttgatttcaacagctttgagcagctgtgcatcaacttcaccaatgagaagctgcagcagttcttcaaccaccacatgttcgtgctggagcaggaggagtacaagaaggaaggcatcgagtgggagttcattgacttcggcatggacctgcaggcctgcatcgacctcatcgagaagcccatgggcatcatgtccatcctggaggaggagtgcatgttccccaaggccacagacatgaccttcaaggccaagctgtacgacaaccacctgggcaagtccaacaacttccagaagcctcgcaatgtcaaggggaagcaggaagcccacttctctctggtccactatgctggcaccgtggactacaacatcttgggctggctggagaagaacaaggaccctctcaacgagacggtggtggggctgtaccagaagtcctccctcaaactcatggccacactcttctccacctatgcttctgctgataccggtgacagtgggaaaggcaaaggaggcaagaagaaaggctcatccttccagacagtgtctgctctccaccgggaaaatctgaacaagctgatgacaaacctgaggaccacccatcctcactttgtgcgctgcatcatccccaatgagcggaaggctccaggggtgatggacaaccccctggtcatgcaccagctgcgatgcaacggagtgctggagggtatccgcatctgtaggaagggcttccccaaccgcattctttatggggacttccggcagaggtatcgaatcctgaacccagcagccatccctgagggccaattcattgatagcgggaaaggggctgagaagctgctgggctccctggacattgaccacaaccagtacaagtttggccacaccaaggtgttcttcaaggcggggctgctggggctgctggaggagatgcgagatgagaggctgagccgcatcatcaccagaatccaggctcaagcccgaggccagctcatgcgcattgagttcaagaagatggtggagcgcagggacgccctgctggttatccagtggaacatccgcgccttcatgggggtcaagaattggccgtggatgaagctctacttcaagatcaagccgctgctgaagagcgcagagacagagaaggagatggccaacatgaaagaggagttcgggcgagtcaaagatgcactagagaagtctgaggctcgccgcaaggagctggaggagaagatggtgtccctgctgcaggagaagaatgacctgcagctccaagtgcaggcggaacaagacaacctggcagatgccgaggagcgctgcgaccagctgatcaagaacaagatccagctggaggccaaggtgaaggagatgaccgagaggctggaggacgaggaggagatgaacgccgagctcacggccaagaagcgcaagctggaagacgagtgctcagagctcaagaaagatatcgatgacctggagctgaccctggccaaggtggagaaggaaaagcacgcaacagagaacaaggttaaaaacctgacagaggagatggccgggctggacgagatcattgccaagctgaccaaggagaagaaagctcttcaagaggcccaccagcaagccctagatgaccttcaggctgaggaagacaaggtcaacacactgaccaagtctaaagtcaagctggagcagcaggtggatgatctggagggatccctggagcaggagaagaaggtgcgcatggacctggagcgagcaaagcggaagctggagggtgacctgaagctgacccaggagagcatcatggacctggagaacgacaagcttcagctggaggaaaagctcaagaagaaagagtttgacatcagtcagcagaacagtaaaatagaggacgagcaggccctggcccttcagctgcagaagaaactgaaggaaaaccaggcacgcatcgaggagctggaggaggagctagaggcggagcgcacagcccgggccaaggtggagaagctgcgctcagacctgacccgggagctggaggagatcagtgagaggctagaggaagccggtggggccacatctgtgcagatagagatgaacaagaagcgcgaggccgagttccagaagatgcggcgggacctggaggaagccacgctgcagcatgaggccacagccgcggccctgcgcaagaagcacgcagacagcgtggccgagctgggcgagcagatagacaatctacagcgggtgaagcagaagctggagaaagagaagagcgagttcaaactggagctggatgacgtcacctctcacatggagcagatcatcaaggccaaggcaaacctggagaaagtgtcccggacactggaggaccaggcgaatgaataccgggtgaagttggaagaagcccagcgctccctcaatgacttcaccacacagcgagccaagctgcagacagagaatggcgagttggctaggcaactggaagaaaaggaggcactgatttggcagctgacccggggcaagctctcctatacccagcagatggaggacctcaagaggcagctggaggaggaaggcaaggccaagaatgccttggcccacgcactgcagtcagcccggcatgactgcgacctgctgcgggaacagtacgaagaagaaatggaggccaaggccgagctgcagcgtgtcctgtccaaggccaactcagaggtggcccagtggaggaccaagtatgagacggacgccatacagaggacggaggagctggaggaagccaagaagaagctggctcagaggcttcaggatgctgaggaggcagtggaggccgtcaacgccaagtgctcctcgctggagaagaccaagcacaggctgcagaacgagatcgaggacctgatggtggatgtggagcgctccaatgcggccgccgcagccctggacaaaaagcagaggaacttcgacaagatcctggctgagtggaagcagaagtatgaggagtcccagtcagagctggagtcttcccagaaggaggcgcgctccctgagcacagagctcttcaagctcaagaatgcctatgaggagtctctggagcacctggagaccttcaagcgggagaacaagaacctccaggaggagatctcagacctgactgaacagctgggagaagggggtaaaaatgtgcacgagctggagaagatccgcaaacagctggaggtggagaagctggaactgcagtcagccctggaggaggctgaggcctccctggagcatgaggagggcaagatcctccgagcccagctggagttcaaccagatcaaggcagagatcgaaaggaagctggcagagaaggacgaggagatggagcaggccaagcgcaaccacctgcgggtggtggactccctacagacctccctggatgccgagacacgcagccgcaacgaggccctgcgggtgaagaagaagatggagggcgacctcaatgagatggagatccagctcagtcaggccaatagaatagcctcagaggcccagaagcacttgaagaacgcccaagcccacttgaaggacacccagctccagctggatgacgcagtccgtgccaatgacgacctgaaggagaacatcgccatcgtggagcggcgcaacaccctgctgcaggcggagctggaggagctgcgggccgtggtggagcagacagagcggtctcggaagctggcagagcaggagctgatcgagaccagcgagcgggtgcagctgctgcactcccagaacaccagcctcatcaaccagaagaagaagatggatgcagacctctcccagctccagacagaggtggaggaggcggtgcaggagtgtaggaacgcagaggagaaggccaagaaggccatcacagatgccgccatgatggccgaggagctgaagaaggagcaggacaccagcgcccacctggagcgcatgaagaagaacatggagcagaccatcaaggacctgcagcaccggctggacgaggcagagcagatcgccctcaagggtggcaagaagcagctgcagaaactggaggcccgggtccgggagctggagaatgagctggaggctgagcagaagcgcaatgcggagtcggtgaagggcatgaggaagagcgagcggcgcatcaaggagctcacctaccagacagaggaagacaagaagaacttggtgcggctgcaggacctggtggacaagctgcagttgaaggtgaaggcctacaagcgccaggctgaagaggcggaggaacaggccaacaccaacctgtccaagttccgcaaggtgcagcacgagctggatgaggcagaggagagggcggacattgccgagtcccaggtcaacaagctgcgggccaagagccgtgacattggcgccaagcagaaaatgcacgatgaggaataacctgtccagcagaaagagcctcgctgttgctatcccacaataaatatgaatgcttgactttgcctgtaaaaaaaaa

SEQ ID NO: 167 - DNA, 1662 bp, rat
cattcagtttagtcagaatccatgggtgggctcagctgtctcctccgtacctagtctgcggttatggcttcgctcacggtgaaggcctatctactgggcaaggaggaggcggcccgcgagatccgccgcttcagcttctgcttcagcccggagccggaggcggaagccgcggctggcccggggccctgcgagaggctgctgagccgggtggctgtgctgttccccgcgctgcggcctggaggctttcaggcgcactaccgcgatgaggatggggacttggtcgccttctccagtgatgaggaactgacaatggccatgtcctatgtgaaagatgacatcttccgcatctacattaaagagaagaaggagtgccggcgggaacatcgccccccatgtgctcaggaggcacgaagcatggtgcaccccaacgtgatttgtgatggttgcaatgggcctgtggtgggaactcgctataagtgcagtgtgtgccccgactacgacctgtgcagcgtctgcgaggggaagggcctgcacagggagcacagcaagctcatctttcccaacccctttggccacctctctgatagcttctctcatagccgctggcttcggaagctgaaacatgggcactttggctggcctggctgggagatgggcccaccagggaactggagcccacgtcctcctcgcgcaggggatggtcgcccttgccccacagctgagtcggcttctgctccatcagaggatcccaatgtcaatttcctgaagaatgtgggggagagcgtggcagctgccctcagccctctaggcatcgaggttgacattgatgtggaacatggagggaagagaagccgcctgacacccacctctgcagaaagttccagcacaggcacagaagataagagtggtactcagccaagcagctgctcttcggaagtcagcaaacctgacggggccggggagggccctgctcagtctctgacagagcagatgaagaagatagccttggagtcggtgggacagccagaggaactgatggagtcggataactgctcaggaggggatgacgactggacgcatttgtcttctaaagaagtggacccatccacaggtgaactccagtctctacagatgccagaatcggaagggccaagctctctagacccctcacaggaaggccccacagggctgaaggaagctgccctgtacccacatctcccaccagaggctgatccccggctgattgagtcactctctcagatgctgtccatgggtttctcggatgaaggcggctggctcaccaggctcctacagaccaagaattatgacatcggggctgctctggacacgatccagtattcaaagcaccctccaccattgtgacagtgctgtggccaagtcccacaacccacctcccttgtcttctagttgcatcatgtagagtagcagggcttctaaggcccagtgtcttggcattcttctagaaccttcaggtgggactgtgaggccttcttaggcagtaggaaagtgcatgagaagagagtctgagtgtgcacatgctgacccctgagcacagatccaagcagctgtggctgggcttmcgctgctttccctcggcctggcctttgccagggagctgtggagtcatgctgcactccactt

SEQ ID NO: 168 - DNA, 1271 bp, rat
ttatatttgggttctgcctactgagccgggagtctgggaactacaactcccagagtgctgagcggatgcacgctctgcttttaggtgtaagccgcaaacatcttggaccccgggagaatccgcgttgaagcacagagcatttagctcctctgtcagaatgaatggggaccagaaactggatgttcataaccaagaaaagcagaatttcatccagcacttctcccagattgtcaaggtgctgactgaggatgaactgggacacccagagaagggagatgctattacccggatcaaagaggtcctggagtacaacactgtaggaggcaagtacaatcggggtctgacggtggtacagaccttccaggaactggtggaaccaaggaaacaggatgctgagagcctacagcgggccctgacggtgggctggtgtgtagaactgctccaggctttcttcctcgtgttagatgacatcatggactcttcccacactcgccgggggcagatctgctggtatcagaagccgggcataggcttggatgccatcaacgatgctctgcttctggaagccgctatctaccgcctgcttaagttctactgcagggagcagccctactacctcaacctgctggagctctttctacagagttcctatcagactgagatcgggcagactctcgacctcatcacagcaccccagggccaagtggatcttggtagatacactgaaaagaggtacaaatctatcgtcaagtacaagacagctttctactctttctacctgcctatcgcggctgccatgtacatggctggaattgatggggagaaggaacacgctaatgccctgaagatcctgctggagatgggcgagttcttccagatccaggacgactaccttgatctctttggagaccccagtgtgaccggaaaggtcggcactgacatccaggacaacaaatgcagctggctggtggttcagtgtctgctacgagccactcctcagcagcgccagatcttagaggagaattatgggcagaaggacccagaaaaagtggcgcgggtgaaagcactgtacgaggagctggatctgcggagtgtgttcttcaagtacgaggaagacagttacaaccgcctcaagagtctcatagagcagtgctccgcgcccctgcccccatccatcttcctggaactagcaaacaagatctacaagcggagaaagtaacctcgaattgtagaggctgcgagggaggggtctcaataaattattgttcaac

SEQ ID NO: 169 - DNA, 539 bp, rat
aaaattagaatagaactttatttgtggaattgagattttgaaaatgattttatagtttatgcaataaatttcgatacattattctggatataaagatggagctgacggttttacctcaagggcctggtacacagccagcccgcactgctcacgcgtgggctcacgcgtgggctcacgcgtgggatctcttcctgtgcttcaatgtggttatggtgggagtccacctgtagcttttgcttgccccaagggtttttgactttaataaaacataattttcataggaaacagtattttttagaaagcataagaaacctggtaacaaattcatacaaattatgcattgaactactctttggttattttaaacaaatttttatactaatgtgatactaaaaatataaaaatgcaactacagaaattcgcttaatctgtaaacataatgaactccgtaaacacgtatgtactacgtgactgcaagcgtgaagagtggctggtaagggcaagtcatacatgtaactcggttctttacggcatgctta

SEQ ID NO: 170 - DNA, 2794 bp, rat
aagctagtctgaaggggttgcgaaaaccccagcaatgtggagaagcctagggcttgccctggctctctgtctcctcccctatggaggagcagagagccaaggccaaagccctgcttgtaagcaagctccaccctggaacataggagatcaaaatccaatgctaaactccgagggcacagtgacagtggttgctcttcttcaagccagctgatacctgtgccttctgcaggcatccagattggaagacctgcgaataaaactagagaaccaaggatattttaacatctcctatattgttgttaatcatcaaggatctccttcccaattaaaacatgcacatcttaaaaagcaggtgtcagatcacattgctgtttacagacaagatgaacatcaaacagatgtctggacactcttaaatggaaacaaagatgacttcctcatatatgacagatgtggccgtcttgtgtatcaccttggtttgccctactccttcctcactttcccgtatgttgaagaagccatcaagatcgcttactgtgagaagaggtgtggaaactgctctttcacgagtcttgaagatgaagccttctgtaaaaacgtgtcctcggctactgcaagtaaaaccacagagccctcagaggagcataaccaccacaagcaccatgacaaacatgggcatgagcatcttgggagcagtaagccttcagagaatcagcaaccaggggcattagatgttgagacaagtcttcctccttcaggcttgcaccaccaccaccaccaccataagcacaagggccagcacaggcagggtcacttagagagctgagacatgggggcaagtgaaggcttgcaactttcacttgcccagaggaagctctgacgaaggggatgcataaaccagctcctgtgtaagttatctgaggagtctggggcagctaccagtagctgctgctgccactgccgacacctcatatttgagaagtcaggatctgcaatcacttgacagtgtgccgaaaacctcccatccttgtgtagctgacaggggcttttcgcggaggagaaagtcattgaatcctgtcaatgtagatcacctccagctgcctgacacagtcagcatgtaagccccacagaagccagccccaactgaagctgaaataataagaccaagaagtgaaaatgaaatttgaactaaatatttaaaataaagcgtactctccccaactccatctaaagacacaatttcatttctagaatgtttccaatccatttaattaattagtgaagtaaaagtagttgaaattggatttgtgcaaacatggagaaatctaccacattggcttctaaaatttaaaatttttatgccacaaaccatttcatccaaatcagatttgtaccgtggggcaactgaaaagtgattgcggccattggttaatatgtcttcctttttctttctccagtgttctagttacattgatgagaacagaaacataaactatgacctaggggtttctgttggatagctcgtaattaagaacggagaaagaacaacaaagacatattttccagttttttttctttacttaaaactttcaaaacaatagaaactttgtctttctaatcttatactttaaaccgattaaatctttaacagactacattttaaatatctacttatcttttttatctctaagactcctagtttgagtttcactacatatatctgtgaatcttgttttttcatctaatgctgtatcagtcttctgagttgtgagtgactgtcttgaaagagtaatggaagaaaagatggtgttaatctgcatagtgcttaagacagtatttccataatcaatgacggtttaatagagaaactgagtcctatgaacctgaactcctttatggctaatacaattaagcaagaatggagaatagaattgattggctacagtacagattatcaaaaataaatgcaacttaaaaagctggaaagtgtgtgtctttattgttcagctcacattgaaagtagaagtgcatctttagagccttaaagaaaactaggtaagttgttgctaatacactaagtgccctgctcaaaaccgcctccgagtgagggctgtctttggaggccgcgagctgctctaggtctcggatagtgttctggagacttgcaatttcttgttcttttcctcctgaagagctgaagcttctaaatgaagcagaaaaaaaactttgtcatagcaacttagaagtaaggttaagtataatgaactacaaagtagcaatcataacatttgtactttaaaaactatcctatggactggaaggcctgtagcttcatttttggtgtgctttaaagagaaagtctagtataaggctacaaaaataatttaatatacttaaaacaaatatggtttgccctggagttatcggtattttgatgctaatttcactgccccaaggacagctgcttagtcacatactcaggaatcagtgacttcaccagaaccttcttcccactgaatttgtaaaatacaggtgaggggcaggtataggatagaaggaggcctgtcattggaggagaaggaaggatgggcgggagagaagtttgaaggaagaggagaagactggaatggaaaagaggaagagacaggagggagagagagagaagccatggcaggagacattaagattctgttctgtgtatttacaggttgctattaatatgttcttaagggatggatggtactgggctttgtatgtttaggtgggcaattatatcttatcaattggatctaaa

SEQ ID NO: 171 - DNA, 3751 bp, rat
agaaagagagctacagactccgcgcgctccggaagaccgggtcgtagagctcgagacaactcccgccagcagcaagacacgggagacccaaccaggatgacaaccctccccaggccgcccgctccatggaacaccagctcctgtgctgcgaagtggagaccatccgccgcgcgtaccctgacaccaatctcctcaaccgaccgggtctgcgagccatgcttaagactgaggagacctgcgcgccctccgtttcttacttcaagtgcgtgcagagggagattgtgccatccatgcggaaaatcgtggccacctggatgctagaggtctgcgaggagcagaagtgcgaagaggaggtcttcccgctggccatgaactacctggaccgtttcttgtctctggagcccctgaagaagagccgcctgcagcttctgggggccacctgcatgttcgtggcctctaagatgaaggagaccattcccctgactgccgagaagttgtgcatctacactgacaactctatccgccccgaggagttgctgcaaatggaactgcttctggtgaacaagctcaaatggaacctggccgccatgactccccacgatttcatcgaacacttcctctccaaaatgccagaggcggatgagaacaagcagatcatccgcaaacatgcacagacctttgtggccctctgtgccacagatgtgaagttcatttccaacccaccctccatggtggctgctgggagtgtggtggccgcgatgcagggcctgaacctgggcagccccaacaacttcctctcctgctaccgcacaacgcactttctttccagagtcatcaagtgtgacccggactgcctccgtgcctgccaggaacagattgaagcccttctggagtcaagcctgcgccaggcccagcagaacatcgatcccaaggccaccgaggaggaaggggaagtggaggaagaagctggtctggcttgcacacccaccgacgtccgagatgtggacatctgagggcccaccgggcaggcgggagtcaccaagtagtggcatccgcgaagagaaaggagccagcccgggtgctcctgacgaggtcccccttggggatgtgttgttaccagaaggggaagttttgttctctttgttggttgtttttccttaatctttctcctttctatctgatttaagcaaaagagaaaaaaatacctgaaagctgtcttaaagagagagagagagatagaattcgcatcaccctgagtatagggagacgggggggtgcctacaaaaatagaattctgtaccccagtaatcaactagttttctattaatgtgcttgtctgttctaagaataggattaacacacaggaagtcttgagaaggatttttgattcttttatgtgtttaagaaaaaaaagcttaagaaacattgctttaaaaaaagaaggaaaaaaaatacagcaaaccattgttaaagtagaagggttttaggtagagaaatgtactctgctttggtgaaaaggcacagatttgggaaggtcctcaacctcactcccctgcttgttcagtgcctacagacctgttacctgatgatacctgtgctttatcccaggagtggggcagacctcttaaccttactgatggtcgattcgacctctagcgggctcgtgggtgtggcaacctccagggctcatgttatgggccctctgccccccacaacctgcaggttcacagagcgccagccagcacgcaggggtagggatgaaatagtgacataatatattctatttttggggaaccttcctgttttgggggttcctgtttagagagatgctggtttttggctggtggccctgcagcccactcaacatcaggttgaacccacagcttttcttttgtgtgtggtttgttttgttatgtttttccttctccatgttcccaaaaccattccatttcaaagcacttttggtcagctagctggaggcagtgttgctgggtgtgtgtgtgtgtgtgtgtgtgtgtgtgtgtgtgtgtgtgtgtcggtgggggagggggtctagtggaatggttggggatgtccacacactcaattctgatggctgcacagcaggtgtgtagggctggtagcatgaggtgcttgggaagttgtgttgggtcgagaagagaaagctctgttctcgtaccaccgggatcttcctgcaaagtcggagggatcttttggtgccagctggcgtttggaagtagggaccgtgatggcattacctggacaaggggattcaggacgactcttaagtctttcacacaggaggcttttaaacactaaaatctctaatttatacgtaaggctacagaagagtatttattgggaaggttgcccatgacccgtgtgactcaaagcaatgtgatcttcccttgattcaaacgcacaccttcttccctgctggcgaaggttttaggccattgtctgagagactggtcttttattggccaagtggggtgtcctccaaaaaaaccaaaccacaaagacggagatgtgggtctccttgactttcccaacccaattgcccccattggagagccatccaaacctgaggaaaattaggggaccccaaaagagtcttgagtctggcacattcttgccgccgctcccaagttagcaacagtaggtaatttgcacacctctggctctgtgcctttctgttcaggatgtgttggtgggaggtggagagcgggtggctggagaggggatgtgagagaagaagtatggagggtagggaccacacgggacagaccgcggctcctttcacagcgctgctaccaatgactcccaggatccccggcgttcggaaccagattcacgttgctttgtatctttcatgttgttttcgctgctattggagggtcagttttattttgttgttgttggtttgtttgtttttttttacaatgtcataaactgccatgttcaagttttaatttcctcgtagaagagtgtatttacagatgccctctccgggactttttctatttattgtgattcaattttggattaatgtgattaccgctgtattcccaacaaaaggtgttttccacacacacacacacacacacacacacacacacacacacacacaggttcctgtacacaatacctcatgtatcacctaacaatacataggcctgccaggcgggtggggcggtctgcctccagggaccctgggaccctgctggggatcatcctgtcatgctgggccttcatttgatctgggacatagcatcacagcagtcaggccaactgtgttctgttagttatcaatattgttacttgtagcggcctgttgtgcatgccaccatgctgctggacccggagagatttgttctgagtctctggtgcatcatataatctgttaggttctagtgttctgtcttgttttgtgttactcacagcattgtgctaatgtaaagccagccgcaatgctgtaggccccaggttccctagcaagctgccaaaccaaaagggtcaccaccagcttagctgaggcgtcccaaccaggcaggacccttgagggctgctgtgtccatggtgatggggtgaagttttggccaaagggccaaaggctggtggatccacacagtctgccctgtgacatgaatggctttgaggggctctggctggtggtcaggttggctttgtgtattctggttgacacaccatggcgcttcccagcacagacatgtgaccagcatggtccagg

SEQ ID NO: 172 - DNA, 655 bp, rat
taaatgatactctattcaaaatgaattctgaaggaaaagttgctcaagtctgtttcagagcataccctttgaaatctttttagactactcttctagaattcatcataaccccaaaatagataaaagctattatctggaagttgccctgacaagctattgcacatctctggtaaatcctgctgaatgtaaggaatattcagagctttcatacctcatcatgatgttatttaagcagccaacttacatgacctgatttactttgaaaaatttgtttcattcaaactagaaagttccagagacaaaggacattgctcagccaagagtgtgaggcgttcttgccctagtctttacttgtgtctgtgctctgggatggatgccgtctgatgtctgttactgatggagcagacactacaaaactattcaactcccatctgtcctgttgttttctagtgctgctttgtgctgagagaacatgttagtttactgaacttgacctgtacaagactgattctttgtaattttagggataaattaggtggttaatttaaagatgaactttcaatgttgcctttacatcacattacaatatcacttctttgagaagggtaatagaagcactgattcatagtaaaaattttgtttttagcctcgtgcc

SEQ ID NO: 173 - DNA, 430 bp, rat
ttaactcagtaccaggggccatttattagacaggtgttagttgccctggaacatggctccatcacaggctcagaagacaagctttacaagagttccttccctggcagagactgttgtgaaaccaataccagagtttggaagagctgaggggttattttagagctgtcagcgtccatcgcggggtggtatgggttcactggcttttggacagcatcttgtcctcacccatttaccatgcccaaccggttggtctgcttcaacccttgcccaagaacagaggacttcagagagctttcattagtgttttcaatagtgtgggtgtaagcttaaggtggaaaggctggccccagaatacacccaggcttggggcagagtcctagtttatgttacaaagctgttggctgtgcttgctgtccctgtcacacatcct

SEQ ID NO: 174 - DNA, 505 bp, rat
gattttcaatgcttcactttattctcaaccacgaggcagccacacactaacttccgacacgggacatcacatgatttcttcggtgtgctccaaggcagacccagctctcctggagtttgcagtcctcagctttcagacgttaaagctttcaccgcagccacaggttcccttgatgttggggttgttgaacacaaactcactggacagtttgtcttccacatagtccatctctgtgcctaacagggttagctgggctttcttctcgatgaacactcggactccgtcttgaataacttcttcatcagcatctccttttgtctttgtatactccaggctgtaagagaggccgttacagcccctggtccgcacacccactttcagacccacatgctcaggcttgtctttaagaagttgttttatcttgttcacagcagagggggtcagcgtgagcgccgcccgcgtgggttgcagttttctcttgctcacggcccgcacggtggcgcgg

SEQ ID NO: 175 - DNA, 469 bp, rat
taaagcattactagtaactttcataaaaaatgtacaaactttgttaaaaatttatcaagccttcaaatgattttggttacagatatttataatacatacatttaaaactatgttaactgacacaatggaatatgatttgaggaaatgactcagcaaatgattccaacaaacacccctgtgagctttcataatctgaaacaaagagcagcatgaggtaagcagatgcacggtgggggacagacttaaggaggcctggagatgctgggaaaacactcagaagcaggcaggcaggcaggcagattgtatgtgattatcacaagaggcccaaatttaataatgttagcaaattacatttcagggagcgtataaaatcaaatttcagattctgctaaaaaaattttttcaggacatcctgatatttggaggccttgagttgttttgtggaggttggagcttttaaaagtacaaa

SEQ ID NO: 176 - DNA, 529 bp, rat
caacactttatatcagaaaaaaagatcagttttccaacaataattccactgaatgagtgcacagcatttgcatgaactacctcagggcaatatcagtacaaaacagttcaaatttgtaaaaaggtcatttcaaaaggaaacctcctgattacttcagggtgagtgccaacaccactgggaaccgaggacataaggcaggaacatggctaccacatggtgtgggaatgggctgctgatggaatccgaagggttgtgaaagtcaatcacgtggatgtcgaacaccagcacagctgagccaggaatgctccctcttccttcttctccatagcccaggtgaggagggaccacaatccttcgcctctctccaatgcagacacccagtaagccttcatccatcccaggaatcacatagccctgcccaatgtacgtgtcaaaggtgtggttccgtgaatagctggagtcaaagagggtgccatccagaagcgtgccattgtaatgatacctaaggaaatccccactctgacttttc

SEQ ID NO: 177 - DNA, 2836 bp, rat
gggctgaggacacgatgtcgggcgcctcccgcggactgttctgggccgccacctgcctcgccgcgctctgcctgtcggccgcgcagagcaacagcagcgcatctcccaacgtgactgacccgccgaccacgaccagcaaagtggtcccgacgacgctcaccaccaccaagccgccagaaacctgtgagagcttcaacagctgtgtttcctgtgtcaacgccaccttgactaataatattacctgcgtctggctagattgccatgaagcaaataagacctattgttcaagtgaattagtaagtaattgtacccagaagaccagtactgactcctgttctgtaatacctaccaccccagtgccaaccaattctacagctaagcctacaactcggccttcctctcctacacctactccctcagttgtcacatcagcaggtgcaacaaataccactgtgactccaacctcacagcctgagcggaagtccacctttgatgcagccagcttcattggaggaatcgtccttgtcttgggtgtgcaggctgtaattttctttctctataaattctgcaaatctaaagaacgaaattaccatactctgtaaacagacccattaaattaatgtggactggcagttaacttgtgtaactcaactgaaaccaaaatattccagaagtcccacatggaagacgctgttccaggacctttacatttccagaggatgcatacaggatattgtggagcactatccttgaagaaaagtcagttaaaccattttgctcaacaggaatatttaaaatattctgcatgaatccatatggctgtcgtcttttgtttaaaatggctgctgctgtgggattgtgtttttccctctgacatgccaaatgtaacttcctgtaagttatggaaagtgctgtcctgtgcaggcagcttctgactctgcagtctaaatgtagtccctagcaacctagagtctgttattttcgtcctaacttgagatgtcacttagtggccagaattgagaagagtgccaagtgaccacccgtcaagcagattgagggccatcgcttcagacatggattaaatttatttagttctaaactacccctagagtaaaattttgtgcttgataaattgtattttatatattaaaaataagatgccacacggcattccagacttagaataaggaaaaggatacatagacagtaatacgcagcaggtcttgttcatactcataaagtaccatattaagaaatagaacagtgccttaagacagaccaagatgtcagcagaacggaaaatgtgttcacactgggaggcaaagcttggtctgagaatgtaatgttggtgtgagcagcagaaacctgcttttagataacatactgttaatatttaattaaaaccattggtttttccagagctgagaactagaagctaaagaataattctaagctgaaaggcttccttctatcaaaccatctaacattttcttagggctattgaatagatataaaatcgatttctctttctctctgtacacagtgtatccaaatattataccttaaggattcctaccaggttttcctgagaagtagcttttatgtgaggcaagaaagaagtaggttgtaggtagaatcattttctagttctttaaatgagacaatcactttgttttctaatagttgtgatctgtgtagcttaaagaaaccttagggtttgcaagagattgctatagatttccagtgatgatgccctggctgaataggcttgtctctcctttagcctgtacctcttttcttcctccttggtttcagtccccatgtgctataatcatgcaaacttttatttcaatagcttctgtcaagcactaagtttgcagtcctggggtcgcttcccccttgcctctgacacactgcactagtctagagggtgtcattggaaataggctttggtttcctgcctcatgcaagtgtgtgcttgcttgtttgtttagagtagcacagtttagcacttggtttccagggttttataatagaaaaggcagtttgatgtgaattggttcataaagtgaaacgaatgacgtctctatttccttgtcacttgctggtacagctgaagtttgttttacttgcacatttgtacatatatctaatgttttcaagtgccttacttgtttaaactctggcttcagaggttttgggggaaagataggtttacctcacagttagtttccattataatctaggttcctcacacaaatctatttcagtgccatggctgttagttttcagtgagtgctcaagttcttttgaaagtacacagaattcccattccttaaaaaggtggcaaaatcagtttgtcatttgcttccatgtgactccttgcaccatataaatgtcagcgtatgtaacaagttttatgagaatgtaacttaatttgaaggtcctgtaattttgagcactgctctaacactgtaggaagttagtgacagtttgcaggtctctacataagctctcgccacagagttcacagctgccctgactctttcccatttttgtttagcaaggtagtattttgagccatcagtgattttgggttttttaatccagaaggtatgtagaaacctttcagagttttcatctgatttgtccggaggctctagttctgtcaaataccttatttcacctttcctatatttgctgcacaagcagacactgctgtacttagaaatttctatttgagttcattaaaaaactacaaaactaatgtgtatgcgtatcaaactgatttaaaataaatatgtttattagtctcttgaaaaaaaaaaaaaaaaaa

SEQ ID NO: 178 - DNA, 470 bp, rat
acaaagcaaacacttttattttctatgcaaaggtgatccagagaatttatataaaggtggggaggggcagccaagcagggagtattactgatggacaggagagagcctggtttcccagtcgcctgagggccctttgattccctgacaggtcaggagggtggcacagagcagctccagcctttgccagagggtacctgtggtgggcaggagcccagcttgagctgtggccattaaggtggggactctagggcaaggggacaggggaagagactggaaactgcctgtgcttattagtcacccttccttgtttgcttttattttcgtttggggagaggtccctgctaggccccttcccagggatgctgtcttgagaggagttgagtggaacatgaatgtggagggaacacacaggcctatgctagctatcaggacagaatgccttccttgtgataaatctttgaggtctcttg

SEQ ID NO: 179 - DNA, 584 bp, rat
ttgactcagaagcagacgtttatttacttaaaacatttcacaattatattgacaattatttatttaaaataatattctaaatacttacaaaaataaatcaagtattgcttctagttttcaagtgtgacagcatttgccatagaaaatagaagggaccttttgaataaactaaacgctacactgaaacttcctcaagtttaataactacacactatttcctctgatgacttgtgctttataaatgtccaaactatttctgtgcaacaaacaggatcacagtaagactgaatgtataacaagccatatacattcatttttacacaaaatgtcagtactctggcccaaaccaccatcatccccaaaatgccagatacaccattatacagaagtacatgtggttgtgaagtttttaacatccagtcatcaaagaccagatatttattattaaagtatactcagctaaaggttgctaggcaagacattttttacttacattaaatcattagtcaaatcattaaaaaaatagaataaacttcaaatatgtctcaatacattaagttaatcccaagataaacatcagtgtc

SEQ ID NO: 180 - DNA, 382 bp, rat
ttaacttaaactcagactttattaaagtttagccgtgtacagtttattttggtactataggttttattagtttctagtttctcaacattttatattgactgtcatctttatagcttacagaaatgaaattagaaacacaagcttttgcacttagtaaacaagagaaaggtggttctcccttctgtttttcttttactgtttgggtgttcagaataaggtcaatgtttttataattgggaaggactggtttggttacattatactacagaagcgtttaaaaattctattgtgaatttcagcttactttaaaacaggtttcatgatgtaaaagcttcttttggaaataagcttttacatgtttactgtctctagtttcatgtat

SEQ ID NO: 181 - DNA, 892 bp, rat; identical to SEQ ID NO: 42

SEQ ID NO: 182 - DNA, 480 bp, rat
agtagaaaaagcattttatttatatggaaaaggctacagtcagatctgtaaaaggtgtcaatataatattgcctattcagaaaaaaaaaaaaaaggtcaactgtgaagagcaacaacaaaaaaaaaaagtcacacaccttctctacctaacagtgcaattaattcacattgcaataaagttaagtcaagtacgataaaacccaaacaagtgtttctccactctactcgctatactgcgaaatacagtgtgcagatcagttccggcttcaagaaatacgcattcaacccacagaatatcctaagacgagggggagggggaacagttaattcatcatcagctgttgggggcttcaatactgttcacgggtgggggtggggggagtcaggagttgacatagaatatatttagtctatacagtaaaaaaatccaaatttttaagtgagctaacgaagaatggaatctgaattcagcctcgtgcc

SEQ ID NO: 183 - DNA, 550 bp, rat
aaaaaaaatcacatttattatcctggtagtggtagctcatacctttatgagaggcattaaagtgaccccagcttggcccatcgccatgtgtgctcccccaccgcccacaatgagttgaagtctcctggctccaagctgagtctctgcctgtcctccagtcctctgcctgtcctcagtctccttcctacagccctgggtgagggtcagtttccaaattctcttctgggtctctaccaatatggctggcaattgccattgaaagccccagagttgcctggagatggactgattcaccaggatcctgctatacttaaggcacacagttgaccaacagtcttcagtcagagtctgtcaacatcggagacctgtgttctctggaagggctctcagcataaggaacaagaccagcagcagaagagaccatgaggccgaaagggagcctggggctgagctattcagccagcatggcccagacctgcacttcttttcttttatgtattcgcagttgtatgtgctgcgtttgcccagagcacggaggtagatgcttgca

SEQ ID NO: 184 - DNA, 485 bp, rat
gatacaaaacagttttatttgcaggccctcacctgtaaggggttcgagtgatggagagggatgtggtggatagatcatatggtagggcatgatgaccctgggtgcttgtgaacagggacttgagggtggggagaagtcctgcagtaagggtggtggatgtaccggaaggctaaaggcaggacacagggttggtcatagctgaagtcaaaggccaatgcaacaggccctcttctccccaggtccaggatcctgtccagcttgggcactgcccagggtgatggcactggtccgggtgctgttctgcctctgcttggacacctttgcaaagatctctttgaggacagtctcaaaggctagctcaacattggtggagtccagggctgaggtctccaggaatagcaggccattgttctcagcaaacatgcacgcctcctcagtggggacctctcgggcctggctgaggtcacttttgttccccacaagca

SEQ ID NO: 185 - DNA, 594 bp, rat
atttacagggaaggagagagagatgaggatctacgtgtcccaggctctcatctcttgtggtaaaaggaagggtgatgttatctcttcttttgctgacgccgcagctcattgttgcgggtcatggcgttggctgcccgagctcgcggtccttgttgtgtgaagtggtacccgaagcggacaatagacggacactgctctagcacagtggccatctccatctctacagcatctccaggccactggcgctggttatctactcggagctcagtgagagtagcgttttctcgaactgccttcagcacagccatgagccctgtgctgctgatgaagttggattcgatgttcaggctcaggagactgcggttctcacgcaacatgtcagccaccgcattggcgatggggtcaccactctttgtggccaccagactgaagctccggacataggtattagtcttcattgcttcacacaagtcgcttagcacgggtatcgggatgtcctggatgttattgaggttcacctcctccagctctttgtcattgctccgcaccctctttagcatctcctcaatgttggtggggtttgggggttcatct

SEQ ID NO: 186 - DNA, 4241 bp, rat
atgactgagatcacagctgaaggaaatgcatctataaccacaactgtgatagacaacaaaaatggatctgttcccaagtcccctggaaaggtgctgaagaggactgtcaccgaagacatcgtgacaacattcagctcccctgcagcctggcttctggtcatcgccctgattatcacctggtcagctgttgctattgtgatgtttgatttagtggactacaaaaacttttcagcaagctccatcgccaagattggctctgatcctctaaaactagtgaacgatgctgtggaggaaacaacagactggatctatggcttcttctctttgctatctgatatcatctcatctgatggtgatgaagatgatgaggatgcagatgaggacattgacaaaggagaaatagaagaacctcccttaaaaagaaaagaaatacaaaaagagaaggctgaaaagcaggagaaacctgagaagaaaatacaaactaaagtttcgcacagagaaaaggagaaaggaaaagaaaaattaaaaggagaaaaacctgagaagaaagcaactcacaaggagaaacttgagaaaaaagaaagaacagagacaaagatggcagcaaaagaggacaagaaaattaagactaaggaaaagaccgaagaaaaggctaagaaggaaatgaaagttgggaaacaggagaaagcgaaaccagcagctgcaaaagccaaagaaactccgaaaacaacaccgaaagccagagagaaggatgacaaagaaacgccagctgtgcccaagcatgagcagaaagatcagtatgcgttctgtcgatatatgattgacatgtttgtccatggggatttaaaaccaggacaaagcccagctgtgccaccaccatcattgacagcttccagacctgctttgtcaacaccatcactggaagaaaaagaaaaagaagaaaagaagaaagtggagaagaaagttacttctgatacaaaaaagaaagaaaaaggagaagccaaaaagaaaagcgagaaagaaactgtcattgatgggaaaggaaaagagccaggaaaacctcctgaaacaaaacaaacaaccaccaaactcacaacacaagctgcagctaccaaagatgagaagaaagaagattccaagaaaatgaaaaaacctccagaagagaaacccaagggaaaaaaacaggaaaagaaagaaaagcacatagaaccagcaaagacaccaaaaaaggaacatccagctccaagtgaaaaacacagaaaagcaaaagctgagcaagccaaagaagagattgctcctgcctcaacaaaaaaggccctgcatggaaagaaagaagagaaagccaagacagtggagcaaggcaaagatgtaaagcctaaactaccacagccacaactaaaaaaggaagagaagtccgagccacaaccaaaaaaagaagtgaagttggagacacaactaaaaaaagaagagaagtcagagcctcaagttaagaaggaagcaaaactagcatcatctgaaaaaggccaaacacgcaaacagaacatcaccagaccagagcaagttattcctcatggtaaaccagaacaaaaagttcccaaacagataaaagctattacagcagaaaagacagaaaaagctgaacgccaagaaaaataccatccatctataaaaacagagggaaaaccagaagtcacagactcagggaagaagaaaattgaaaaacctgaaaaggaaagtaaagttccaccaaaacaagaaaatcttcaggtgcgcaatgtgactagagcggaaaaacgtggaaaaatatcaaaagattccaaagatgcaccagctccaaagaaagataaagactccaaagatgtcctgcattcaaagaaagataaagaagtaactaataatgtgtcttcaccaaagaagcaaaaaagtcccatcagtttcttccaatgtgtctacttggatgggtacaatggctatggatttcagtttcctgtcactcctgtccaacactctggagagaaccctggcaaatcaaactctccaggacagaagcagcaagaacaatagacacccatacatgaccctgacaactgcttttacatcatgaaagtggaatcttctcttttgttcacagtggcacgggcagtcaaaactaaccagtgctgagatttcattgtaaacattttgcctggcataaagaaatagcatggacaaaagggttgactaataagcaaatgtgttgagggtctaatacttgagaatctttatttgtgtctgttgctataggaggggtacttacattcagctctttctagtcgttataaggtagtaatctcattaaagtttacttttaaatgtaattggcacaattacaaaatgagatttatgacttcaggtagataatttttaatttggttatatagactgtgttctaattttaaagagtacaggagcatatataaaagttattcttctgcatcatgtgggtagactcagtttacccaaaaacctatgtgcgttattacattcatttctgtttctagttctattgtgtcaagactctacataggtgtgtcttacaccagagtgctctaaatcccttgtcatatctaacagatgggacatgacaaagaataagtacttgttggatcttatctctgaggttgtcttgagctatgcttaagacattctctcttatggacatatacttgcagttaagcaggtctggtaaaccacttgcttaatatgcaagttaatgagatatgaaattttcacatttctccagattgtgccccagtaaatccatcacctgggtgaaggtttagatcaaacattaactatggttgacaaatacaaacatagttttatttctcaatacattctttctgtgagagtaaatttttttttcaaatggaaacaatacaaattccataaatgtttaagcgagatattttgggcctaggcatgtttatgagatgcctttcttttggctgattgaacattaacaccagttaaatgaatggcagtttctaatatacgtgtccaggcatcactgaaaataacatcttcttggtaatacaaacactcgattttaatgaacttttcttatcaactctagaaaacatgactgtactttttcttcaagtttccagttgtagctgaacttgtgacaaattaacaagttcaactcatggaaataacttgagttaccatttctggcattatcagaagctcagccaatgctgagctactgactttgtgagcaagctgtgtggttggtcttaaagtactacagccaaacacagttcttgaggtccaagacaaaggttcattttatcaatattcaggtaagatgtagatcagatacatcattagtattaatgatggaatgttggtgactcttgtaagaaagtcagcttcaaccagatgctgacagactggattcacactacagaaaccaacactacaatgaactagtttaatggagccatttggaggggaaggagtacataattgaccagagcaaatgataccatctttcaaagccacttcattcagcaattcaaactcacaaggagaacagtggataaagcgctctacttagttggagtttcacccatgcaagttcctgagtatggaacagagaacaaatgtgacagttgttttaaaagacatgctacagaatgggttatccactaagttattacctttcaatgactatatactaagctcttagtctttctattctgtgtcagataatacagcaaaaggttttacttcatgctacactggcacagtaaatgacattcaaaactgcattatatatatatatatatatatatatatatatatatatatatattgggtctgtatctccaggttaccaggaaccatcaaaacaaacagctcagagttgttttggagacagataaagtgtcttaatatggatttgtttgaaaacactttctgaaattatggttttggagattacattaatcttatctccaccaatttcgaaatatccatctattttctttatgaaacaaattgacaaaatataagagatgttactataaatttagatgttagagaaaacaattatggtataattaatattaacaataattattacattttgtctaaaatttcaatgttgagtataatttgaaaatattatccaaactggcatctgtttgtatctttacattaataaaatacttctgacccctgaaaaaaaaaaaaaa

SEQ ID NO: 187 - DNA, 1025 bp, rat
gagcagctgtcccgagatacgggataccccctgtccatctgctctccccagggtggctgcccatcatgtccaagaataaactccagctagtccctgcgtggatctgaatcatctgagagcttccaaaggaggggagtgactacccaggacgcacaggcaggctatataagttcccaagggctgggctccacacagatctttgcctgtggctactgcctgctgccagagagttaccaaaagagagcttgcttggcatctaccatgtccgaggctggcactcctgaagcccccatcaagaagaagcgcccccctgtgaaggaagaagacctgaagggggcccgggggagtctgtccaagaaccaggagatcaagtctaagacgtaccaggtcatgcgggactatgagcaagctggctcagctgccccatctatattcagccgcaaccgcacgggcaccgagacagtcttcgagaagcccaaagagggacctgccaagagcgtctttggctgagaagtgcactttgcactacacccctgggcacagcaacctgtccacgaactctctctctctctctttttttttttttaatgctggaagatgcttttcctctgccacctctggaaccatcttgactgtcacaaccctagcccttggaaacaccaataaagaatacgccacttgggaaggtaccatggccactacctgcagaagagagggacagcatattgagtgcccttcctggtccccgaggtgggtcggggaatgatgtgtgtgctttcagaaccactgaggtgttctagaaagagccttagacatggagtcctgatacggactttctgacggatgtagacttgtctgttttctctaaatctctgttttaggctggaaagacggtgccatagctaagagtacttgctgtttctttagaggacgctggttcaattcccaaacagccgcatggctgctcataaccatttaactctgccaccctcttctggcctctgcgggcattgcatacacgtggt

SEQ ID NO: 188 - DNA, 475 bp, rat
tttttttttttttttttccaaataacacctggagaggaaggacacaaaagaagaatgttggctcacaaaactctgggctgggggtggctgtcctgcaaccctgcctcattcagcccctcagtgccttctctccccagccctgtttgagctattataagttaaccctctcatggacttcagtcgtcgccgagcctgtatccactatgacctatagattggtaccacagcttacagaatcatggggcctgaacccctcaatcatgcacccctccgctggccttttgcttggtgtgtgctgtctccaggcaacctggcttacctttacttaaagctaggcatgcctgcttgggacctctctgggccctcggagattggtaatggctggggcctgctgttttcctctcttggtaattgaaggggccacttgggaaatctactctcaagcttgtctgttgggtcattttgatttggggat

SEQ ID NO: 189 - DNA, 580 bp, rat
  misc_feature (310)..(310): n is a, c, g, or t
cacaatttttattgcaacgtggccacttttatgagggcagggagtttgatctcaaaacaatgttccatttaaggctcttttatacagaaattgccatcatgactgatattcaaaatatctgtagtgtttcaagactcatatggtaaacataaaactcctataattatacagtagtgtacactcattgggaatccaaagacatcaacacatctattcctttgaagaaaatatgcaggtaagaaaaatgaacactgagatactaggataaattgaggacaggtaatgaaacttaattggcattctttataanggactaaacgcattacaaaataaaagtgcttttaaccaataatgttaaacctgtgctgccatgtcacaataagcgagccaaggcgggtgaggtgtgtgactgctccagtgccgcaaagaactgtgatcaagtgcagctcgactataaataatactgaaacaagtttcccatatgaccagtggagaatactttcaaggcattcaattagctcaaccctctgtagtactctaagctattcacgctgacaatccgttgtagtgctcacgcaag

SEQ ID NO: 190 - DNA, 2297 bp, rat
agacctgaaaggggaatttcctaaatctccaggctggacagtttgtttctccctctcacctcctataactcatctgagtcttatctccatatcacatttctaagtctcttgtactcagagtcattgtgactcttgggaggccagagccaggctgaacagagtccttccctgcagtactctatgagaatatgtctttgggtttgaaagaaaggtggtgttatcacctacattggctccagcggatcctcccccagccggaccagcccagagtccctctatagtgacagctccaatggcagcttccagtccctgactcaaggttgtcccacatacttcccaccatcacctactggctccctcacccaggaccctgcccgctcatttggcactgtgccacccagcctcagtgatgatagctccccttcttctgcttcatcatcatcatcatcttcctcctcctccttctataatgggagcccccccggaagtctacaagtggccatggaagacagcagccgagtgtcccccagcaagggcaccagcaacattaccaagcttaacggcatggtgctactgtgtaaagtgtgtggggacgtggcctcaggcttccactatggcgtgcatgcctgcgagggctgcaagggctttttccgccggagcatccagcagaacatccagtacaagcggtgtttgaaaaacgagaactgctccattgtccgtatcaatcgcaaccgctgccagcagtgtcgcttcaagaagtgtctctccgttggcatgtctagagacgctgtgcgttttggacgtatccccaagagagagaagcaacgaatgcttgctgagatgcagaacgccatgaacttggccaacaaccaactgagcagcctgtgccctctagagacctcacctgccccgcaccccacctcaggctccgtgggcccctcaccacctcctgcaccagccccgacacctttggtgggcttctctcagttcccacaacagctgacaccacccagatccccgagtcctgagcccacggtggaggatgtgatatcccaggtggccagggcccatcgagaaatcttcacctatgcccatgacaaattaggcacctcacctggcaacttcaatgccaatcatgcatcaggtagccctccggctaccactccacagtgctgggagagtcagggatgcccgtctacccccaacgacaacaaccttttggcggctcagcgtcataatgaagcactgaatggtctacgccagggcccctcctcctaccctcctacctggccttctggccctgcccaccacagctgccaccagcctaacagcaatgggcatcgcctgtgccccacccacgtatactcggccccagaaggcaaggcacctgccaacggtctacggcaaggcaacaccaagaatgttctgctggcatgtcccatgaacatgtatccccatggacgtagtggccggactgtgcaggagatctgggaagacttctctatgagcttcacacccgctgtgcgggaggtggtagaatttgccaaacagatccccggcttccgtgacctttctcagcacgaccaggtgaccctgcttaaggctggcacctttgaggtgctgatggtgcgctttgcgtcattgttcaacgtgaaggaccagacagtcatgttcctgagccgcacaacctacagcctgcaggagctcggtgccatgggcatgggtgacctgctcaatgccatgtttgacttcagcgagaagctcaactctctggcgcttactgaggaggagctgggccttttcacggcagtggtacttgtctctgcagagggctcgggaatggagaattccgcttcggtggagcagctccaggagacgctgctgggggctcttcgggctctcgtgctgaagaaccggccctcggagacttcccgcttcaccaaactgctgctcaagctgccggacctgcggaccctgaacaacatgcattccgagaagctgctgtccttccgggtggacgcccagtgacccgcccggccggccttctgccgctgcccccttgtacagaatcgaactctggacttctctctcctttacgagacgaaaaggaaaaccaaaccagaatcttatttatattgttataaaatattccaagatgagcctctggccccctgagccttcttgtaaataactcttcccccccacccccatgctcccttcctcccgtatttaaaccactcttgctctcccaccctcctctggcccctcgatttgttctgttcctgtctcaaatccaa

SEQ ID NO: 191 - DNA, 530 bp, rat
agaaaattcctttattatagtgcaaataatctttcagcagtgacataatgtaacacacacttaacaacactttacaccacgcagtaaataagaaagtgtttctttgaaaatatgtcatcataggaacagtatctttacattaatgccagaaaatgccaaagctgttttcgcaaggcaatagggcttgatcctttttttggatatttttttctcttaatgcacatggatttgccatttaattcatcatcaactcttaagagtgacctcttagggagttttagagaagttggcaagatttgaaactgggcttcaaaatttaaaaaaatattaattttaagacagttctgggatagcccaggaagcagaagtcacttctgttaacttgatagatacatttactccaactttgctgtagattgtctaaagcctgcttatttccccagagcctgactgttatctcttggtattggttattgcaaagccagggccctgggtggacagaaccccttgtgtatgcaaatactttcccc

SEQ ID NO: 192 - DNA, 4276 bp, rat
gcggctgcgcggggtatgcggaacgggctcgtgtggctgctgcaccccgcgctgcccagcaccttgcactccatcctcggcgctcgcccgcctcccgtgaagcgactgtgtggattcccaaaacaaatttacagcacaatgaataatccggccatccagagaatagaagaccatattgtcaagtctcctgaagacaaacgggaatatcgtggactagaactggccaatggtatcaaagtgcttctcatcagtgatcccaccacggacaagtcatcagcagcactcgacgtgcacatagggtcactgtcagaccctccaaatattcctggcttaagccatttttgtgagcatatgctgtttttgggaacaaagaaatatcctaaggaaaatgaatacagccagtttctcagtgaacatgctgggagttcaaatgcatttaccagcggagaacacaccaattattatttcgatgtttcccatgaacacttggaaggagccctggacaggtttgcccagtttttcctgtgccccttgtttgatgcaagttgtaaggacagagaggtgaacgctgtcgattcagagcatgaaaagaatgtgatgaatgatgcctggagactcttccagctggaaaaggctacagggaatcccaagcaccccttcagcaaattcgggacaggaaacaaatatactctagagactcgacccaaccaagaaggcatcgatgtaagggaagaactcttgaaatttcactctacgtattattcgtccaatctgatggcgatttgtgttttaggtcgagaatctttagatgacctgactaatctggtggtgaagttattttctgaagtagagaataaaaatgtccctttgcctgaatttcctgagcaccctttccaagaagaacatcttaaacaactttataaaatagtacccattaaggatattaggaatctttatgtgacatttcccataccagaccttcaacagtactacaaatccaatcccggtcattatctcggtcatctgatcgggcatgaaggtcctggaagcctgttgtcagagctcaagtcaaagggctgggtaaacaccctggttgggggacagaaggaaggagcccgaggttttatgttttttatcattaatgtggacttaactgaagaagggttattacatgttgaagatataattttgcacatgtttcaatacattcagaagctacgtgctgaaggacctcaagaatgggttttccaagagtgcaaggacttgaacgctgtcgctttcaggtttaaagataaagagaggccacgaggctacacatctaagattgcagggaaattgcactattatcccctaaatggagtgctcacagctgaatatttactggaagaatttagacccgacttgatagacatggttcttgataaactcagaccagaaaatgtccgggtggcaatagtttctaaatcatttgaagggaaaactgaccgcacagagcagtggtatggaacccagtacaagcaagaagctatcccagaggacgtcattcagaaatggcaaaatgctgacctgaatgggaaatttaaacttccaacaaagaatgaattcattcctacaaattttgagattttggcattagaaaaagatgcaacaccataccctgctcttattaaggatacagccatgagtaagctgtggttcaaacaagatgataaatttttcttgccgaaagcttgtctcaactttgaatttttcagcccgtttgcttatgtggaccccttgcactgtaacatggcctatttgtaccttgaactcctcaaagactcactcaacgagtatgcatatgcagcagagctagcaggcctgagctatgatctccaaaacaccatctatgggatgtatctctcagtgaaaggttacaatgacaaacagccaattttgctaaagaagatcaccgagaaaatggctacttttgagattgataaaaaaagatttgaaattatcaaagaggcgtacatgcgatctcttaataatttccgggctgagcagcctcaccagcacgccatgtactacctccgtctgctgatgactgaagtggcctggaccaaagatgagttaaaagaagccctcgatgatgtgaccctcccccgtcttaaggccttcatacctcagctgctgtcccggctgcatattgaagcccttctccatggcaacataacaaagcaggctgccttaggagttatgcagatggtagaagacacccttattgagcatgctcacaccaaacctctccttccaagtcagctagtccggtacagagaagttcagctccccgaccgaggatggtttgtttaccagcggaggaacgaagtccacaataactgtggcattgagatttactaccagacagacatgcagagcacctcggagaacatgttcctggagctcttctgccagattatctctgagccttgcttcaacactctgcgtaccaaggagcagcttggctatattgtcttcagtggacctcgtcgggccaacggcatccagggcttgcgattcatcatccagtcagaaaaaccacctcactacctggaaagcagagtggaagccttcttgatcaccatggaaaaggccatagaggacatgacagaggaggctttccaaaaacacattcaggcgttagcgattcgccgactcgacaaaccaaagaaactctctgcagagtgcgcgaagtactggggggagatcatctcccagcagtacaattatgacagagataacatagaggttgcatatttaaagacactcagcaaggatgatatcatcaaattctacaaggaaatgttggctgtggacgcaccaaggagacataaagtatccgtccacgttcttgccagggaaatggattcttgtcctgtggttggagagttcccctctcagaatgatataaacctttccgaagcgccacccttgccacaacctgaggtgattcataacatgactgaattcaagcgcggcctgccgctgttcccccttgtgaagccacacattaacttcatggcggcaaaactctgaagaagcagctgcgcccctgtgccttccggggccaggaaagcagtctcagctttgagtagtttctggcttgcaattagagagacaaacagaaaagagttatcaggcattattatgtagaatgttaaaaacccaaagtaataaaattataaagtcttatagatgtagaatatttttaaaatctcttaaatattttaatgtttttctttttattcctaaaagaaatttccttatattaactgcttaatctgaagaaagatatctcagtacaatctttcttccttattctgtaaaatagtcacttgtctgaaaaaaaaataagagcttttttttcttaaaggcttcagaacacttagaaaggattacctttttaagacgcgatcaagctcagatctgcttctgtcgatggttcctgtgaaccagcagagcatcgcggtgggcagatagtgcacaaagcggttccgcgttcctttactagtgaacctgctgattaactaaggcatggttttaatgtttttataaaacttgggtatgttttttaaccttcttagtcaaatgctagaaaacccagaatacccaatttacagtgctagaaatgcagattaaccttgaatcaagttcggaatttctcaggattcctgtgggttctctctcatcgaattctgttgacatttctgtttctcgtagttggtctgctgggttccatcagcagacacatactgctgtacagcgtgtgagacatgctgtgctgacatcagctgttgtgactccccgtaactcctagggtgaagttgtgatccgtgtgtgaactaaaacatttgcccctttagggactcaaaaggcagcaaatacaaagccacctccttggaggatacaaaactgtggcgttcttaaacagccagtctccgtaagactctaaactccccactgcttccggtctcatcttgccttaagtgttattttttgaatatatgaatataaacatacagatgatgactggagtggacttttaaaaaatatttttttcacaagatactattttaggtgaaaatgttactgtagatttaacagctgttttaaagtatttgctattattaaaacttcttcaagaacaagcgtggctatgctcccacacacaggcaatagtaacagaaagtgctcctgtttgtccaccagctcaggcaaagtacagaatggcgtttcc

SEQ ID NO: 193 - DNA, 420 bp, rat
aaaagaaaaatgttaagactttattcaagatgtttatcaggcattataacaaaacagcagagcttcagcctccggaacactgcactttacatcccttagacacgcagtccagtgtactattaattatttccatcctagagagacctcagaaataagctggaggaaatgcgcagtcacgatccgcaacatcagctctcccagcgtgcactgtcggaggatgaagcacatcttccaccacttgtaatacttcaaatactgtgcaagatgaagaaccgggatggctatgtgatggttgtgattgacaagcactcttaatacaaacacacggacagtttaccacagagaatgcatatatcaaaggccagcaaagtgagcaagctattcacacaaagccaggaggcattctgactaaatctccag

SEQ ID NO: 194 - DNA, 649 bp, rat
ttttttttaaaatatttccttttattttcttaggcacacgagtgatttgggataccaactttcaagacattgtaactgttttgctgttagaatctgctactgtagatcccagtcacctttgagaacagtctgtagcaatcactgtgcagttcagatgtaccaggtcgcaaagtcaacagtgtctgttcaatttgtgagtttatttgaactcctgagttttaaatgtcctaagaaagtaactcctcaccccgtttaaatggcttttcagcctaaagcaatgaactttaaaaatatatatcctaaataccttattataagagaaaccagaaacatctgaggatccagacaataactattacctggaccattccaagcctgggagtagccttcagcggcaacactatctcagctccaaggccatcaacccagttacagctgttgtctggtttcccaataaacttttttctcttcgatgctcctttcctgtaaatggcatccatctgccacacaggaaggatctattgtaccaatgtggcacagactagcagctttcaagaactggaaagttcagtctcgcggacatcaaatttaagtcacagtaactttcccagtaagagtccaaatcaccaccacgggttaacaggtctgg

SEQ ID NO: 195 - DNA, 961 bp, rat
tttcccaacaggatctcccaccagcccagcttttctatataggctctgacctctggtcatccaagttgcaggatgtcgatgacagacttgctcagcgctgaggacatcaagaaggcgataggagcctttactgctgcagactccttcgaccacaaaaagttcttccagatggtgggcctgaagaaaaagagtgcggatgatgtgaagaaggtgttccacattctggacaaagacaaaagtggcttcattgaggaggatgagctggggtccattctgaagggcttctcctcagatgccagagacttgtctgctaaggaaacaaagacgctgatggctgctggagacaaggacggggacggcaagattggggttgaagaattctccactctggtggccgaaagctaagtggcgctgactgcttgggtctcccacctctccaccccccatgccccatctcagcccttctcgcggccctcctgggtttctgttcagtttgtttatgttattttttactcccccatcctttatggccctcgaatgacaccactcttctggaaaatgctggagaaacaataaaggctgtacccatcggacaccacctgtagggaggacccaggcctggtaggtgttggtttggcaagtttttccggacagcagtgggggtatagtagaaaaagtgagagagagcgaaggaccacgccctgatatttcctgcctgcttggtaccgagtggtcacgtgggccaccttgttcagtctttgtgcctttcctacaaggggatgggatggcgcaggggattttaaagatgcagaaactgccttttaaagagcagaacggaaggggctgagtccacaggtgattactttatgtccctgaggaataactaggtcgaaggactcaaatgacactctatcaattgcttttgactttgctgtgataaaattcctgataagagaaactt

SEQ ID NO: 196 - DNA, 4257 bp, rat
gacaggcagtcctgcagagcgcatcagggtgcatctctagacagttggggatcgccaggtcggagtgtgcaccgggtctgctaagttttgccttcacccagagtcttggatcccgcctggatggagtcccttctgggtttccattggctcctgtgagtgcttgggtgtctggagattgttttttggcgaaggggaacaacttttgaagttcgcccaggagaccgcgttccaaccctagtgcctaggcagccggacccgcgggggcgcgaccgcggcgggagtcaccatgggcagcaaaggcgcctaccggtaccattggcagagccacaatgtcaagcacagtggtgtggacgacatggtactactctccaagatcacagagagctccatcgtagagaacctgaagaagagatacatggacgactatatttttacatatatagggtctgtcttaatctctgtcaaccctttcaagcaaatgccatattttggagaaaaagagattgaaatgtaccaaggagcggcccagtatgagaacccacctcatatctatgcccttgcagacagtatgtacagaaacatgatcatcgacagagagaaccagtgtgtcatcatcagtggtgaaagtggtgctggaaagacagtagctgccaagtacatcatgagctacgtctccagagtgtccggaggaggccccaaggtccagcatgtcaaggacatcatccttcagtccaacccactcctggaggccttcgggaatgccaagacagtccgcaacaacaactccagccgatttggaaaatactttgaaatccagttcagtccaggtggggaaccagatggtggcaagatctccaacttccttctggaaaagtccagagtggtgatgaggaacccgggagaacggagcttccacatattctaccagctcatcgagggcgcctctccagagcagaagcaaagccttggtatcaccagcatggactactattattacctgagcctctcagggtcatacaaggttgatgacattgatgacaagcgggatttccaggaaaccctgcacgccatgaatgtgattgggatcttctcagaggagcagactctcgtgctgcagattgtggctggaattctccacttgggaaacatcaacttcaaggaagtgggcaactatgcggccgtggagagcgaagaatttttggcttttcctgcgtatctgctgggtataaaccaagaccggttaaaagagaagctgacgagccggcagatggacagtaagtggggaggaaagtcagagtccatccatgtgaccctcaatgtggagcaggcctgctacaccagggatgccctcgccaaggccctgcacgcgcgagtctttgatttcttggtggattccatcaataaagctatggagaaggaccacgaggagtacaacattggtgtcctggacatctatggctttgaaatatttcagaaaaatggcttcgagcagttctgcatcaatttcgttaatgaaaaattacagcagatttttatcgagctgacgctaaaggccgagcaggaagaatacgttcaggaggggataagatggacacccattgaatatttcaataataaaattgtgtgtgacctcatagagagcaaagtcaaccctcctggaattatgagcatcctggatgacgtgtgtgccaccatgcatgctgtgggtgagggtgctgaccagacactgctacagaagctccagatgcagatcgggagccatgagcactttaacagctggaaccaaggtttcattattcaccactatgctgggaaggtttcctatgacatggatggcttctgtgaaaggaaccgggatgtgctattcatggacctgattgagctcatgcagagcagtgagctgccttttataaagtctttatttcctgaaaacctgcaagccgacaagaaagggcgcccaacgactgcaggaagcaaaataaagaaacaagccaatgacctcgtgagcaccctgatgaaatgtacaccccactacattcgctgcataaaaccgaacgaaaccaagaagcccaaagactgggaggagagcagagtgaagcatcaagtggagtacctgggtctcaaggaaaacatccgagtgagaagggctggttatgcttatcggcgtgtcttccagaaatttctacagaggtatgccattctgaccaaagctacctggcctgtgtggagaggagatgagaaacaaggtgtcctccatctgctacagtctgtcaacatggacagcgaccagttccagctcgggaggagtaaagtgttcatcaaagccccggagtctctatttcttctggaagagatgagagagagaaagtatgatgggtacgcacgcgtgatacagaaaacatggaggaagtttgtggcccgcaagaagtatgtccagatgagagaagacgcctcagacctgttgttgaacaagaaggagaggaggagaaacagcatcaaccgaaacttcatcggggactacatcgggatggaggagcacccggagctccagcagtttgtgggcaagagggagaagattgactttgctgacatagtcaccaagtatgacaggaggttcaagggtgtcaagcgagacctgctgctaaccccaaagtgcttgtacttaattggaagggagaaggtgaagcaaggcccggacaaaggtcttgtgaaggaagtcctgaagcggaagatcgaggtggaaaggatcctgtccgtgtccctcagtaccatgcaggatgacatcttcattctccatgagcaagagtatgacagtttgcttgagtccgtctttaaaacagagttcctgagccttttaacaaagcgatatgaggaaaaaacccagaagcaactacctctgaaattcagcaatacccttgaactgaagttgaaaaaggagaactggggtccctggagtgctgggggctcccggcaagtgcagttctaccaaggcttcggtgacctggccatcctcaagcccagcaacaaagtgctgcaggtcagcattggacctgggctgcccaagaacgcccgtcccaccagaagaaacactgtctcaagcagagggtattctggtggaactaacaacaattacccgatgagagccgcccctgctcccccaggatgccatcgaaatggcctcaccagaaaccagtttgtgcatcctccccgtgcctctggaaaccagaggtccaatcagaaaagcctatacacctctatggcccgcccacccttgccaaggcaacagtccacaggctcagaccgattgtctcagacaccggagagcctggatttcctcaaggtcccggaccagggtgctgctggagtccgaagacaaacgaccagccggcctcccccagcaggcggcagaccaaagcctcagcccaagcctaagcctcaggtgccgcagtgcaaggctctgtatgcctacgatgctcaggacacagacgaactcagcttcaatgccaatgacgtcatcgatattattaaggaagatccttctggctggtggacgggtagactacgaggcaagcagggcctgtttcctaacaactatgtcaccaagatctgaggcgcccagaaattgtcatgcaggcagaggagctccagacgtggactggggaggggactttttggggactccccttctgatccacaatgagcaactgctactccaaggtctgaagctattctggtaccttccccatggaagacgcagaaaagcttgggatgggaacaaggagtttcactccgtaaatgatcctaaaaggtagtctagttcccaggagcgccaaaacaaccacccactaagatttatttattgtatttaaatctggtgaaagcagcaggggctgctgggtgtctatcccgcagcctccagcgcactcaccaagcccaggggacagcaggtggtgactatgacaagtgcctttagttgaagagcacgtttcattcattcctctcttccatacctgatacattcctttctgctaaccctccttcagggaggacccaccctctgcaggctggacttggtgtgaacaggcactcacctgtcaatgccaagggcaggccgtccttccaagcccatgggagccagggccactaagactgctggtggggaggaagttgggtgctgggctgactgatggtcttgctttcccttggtctttgcttgtaatgtggctggcccatgttggttttatgtttaatgttgtg

SEQ ID NO: 197 - DNA, 1630 bp, rat
cttttttttcctctcccttgatttcaacattttcccgatcttcttggcgccgccgacgcctcttacctgttctgcgcagcgcgcgagctggcagctgagagaagtgggggtgcgttttaggttttaagcaaaggcaaaaaaaaaaattaagccaaatccattttttttccttcacctctccccgtttcaaggcctccaagatcattatttctgtagctttggggtgagcgattctgtgtttctcttcatcacccctccaattctgccccgatcccgcctgggtctccactcactgcgtgcacctggcgcgcctcttttttttttcacccccaacctgttgcaagtctttaatccttgcaattgggacttgcgtgcaggcacctgaatcctccttgcctcatattttgcaagtgtttggaggacagcacctgctttacctgcaagagatattttttaaaaaaaaaaaaatctccaggctccctcttggcccctttctccacacactctcgctctcctgccccgccccgaggtaaagccagactcggaaaaaatggtgatcagcgtggtcctcctgctgctggccgcctgtgccgtgccggctcaaggcctgggctctttcgtgcattgtgaaccctgcgacgagaaagctctgtccatgtgtccccccagccctctgggctgtgagctggtcaaagagcccggctgtggctgctgcatgacttgcgccctggcggagggacagtcgtgtggcgtctacactgagcgctgcgcccagggtttgcgctgtctcccccggcaggatgaggagaagccgctgcacgccctgctgcacggccgcggggtttgcctcaacgaaaagagctacggcgagcaaaccaagatagagagagactctcgggagcatgaggaacccaccacctccgagatggctgaggagacctactccccgaaggtcttccggcccaagcacactcgcatttccgagctgaaggccgaggctgtgaagaaggatcgcagaaagaagctgacccagtctaagtttgtggggggcgcggagaacactgcccacccccgagtcatccctgcacctgagatgagacaggaatctgaccaaggcccctgccgcagacacatggaagcttccctccaggagttcaaagccagcccacgcatggtgccccgtgccgtgtacctgcccaactgtgaccgcaaaggattctacaagagaaagcagtgcaagccttctcgtggccgcaaacgtggcatctgctggtgtgtggacaagtatgggatgaagctgccgggcatggagtacgtcgatggggactttcagtgccacgccttcgacagcagtaacgttgagtgacgcgtcccctcccttcctccccctttcctaccccccagccccaactccagccagcgcctccctccaccccaggacgtcactcatttcatctcatttaggggaaatatatatacatatatatttgaggaaactgaggacctcggaatctctagcaagggctaaggagacactccccattcccgaccccggaaacgtattcctatttgaagcaagttgaacggacagagaagggaagaagagaaggggcaagaaggagcgaggaat

SEQ ID NO: 198 - DNA, 3169 bp, rat
ccgcacgctgaaccggaggaactgcgcctagtcggggcgctgagggaccctccaccgggacgccggcccctccccgggcctctgctcacttgcccccctgcgagcccgtccccctagtcggcctctcggatcggggacgtggggcgagctgagagcaggcccggggtgggtggtcactgtggagaagacgtggctgtcaagatgatagaagtactgacaactgactctcagaaactgctacaccagctgaacaccctgttggaacaggagtccagatgtcagccaaaggtctgtggcctgaaactgattgagtctgcacatgataatggcctcaggatgactgcaagactccgggactttgaagtcaaagatctactgagtctaactcagttctttggcttcgacacagaaacattttcccttgctgtgaatttactggacagattcttgtctaaaatgaaggtacaggcgaagcatctcggctgtgtcggactgagctgcttttatttggctgtgaaatcgattgaagaggaaaggaacgtcccgctggcaactgatttgatccggataagtcagtataggttcacagtttcagacctgatgagaatggaaaagattgtgttggagaaagtgtgctggaaagtcaaagctactactgccttccaatttctgcagctctattactccctcattcgggagaccttgccatttgaaaggagaaacgatctgaattttgaaagactagaagcccaactgaaggcgtgccactgcaggatcatattttctaaggcaaagccttctgtgctggcgctggcaatcatcgctttggagatccaagcactgaagtatgtggagttaacagaaggagtagaatgtattcagaaacattccaagataagtggccgagatctgaccttctggcaagagcttgtttccaagtgtttaactgaatattcatcaaacaagtgttccaagccgaacggtcagaagttaaaatggatcgtgtctgggcgcactgcacgacaactgaagcacagttattacaggataacccacctcccaacaattcccgaaaccatgggttagttggcaaatctggttgttatcctctgtgtacagaacatttcccagtgagatcgtttttgtgctataacttaaggattgaaatactaccttcaatataaagaatacaggatgaaaacagtaaaggaaacgtgagtttgttggtctagacagagaatactgggaggcattcactgtgtaccgcagtctgaagagaaatgagtatcaaacctctagacacatgctcatactgctgtcaaaggactagcgtagaaaagagagtcctccaaaccggaagtttaaatgtagttactaaaatagcacttcttataacttacatatccccccactgtggcttatttaaagttacagaagtccaagcagaacgacaaaagatgtgacccatatatgaacacattttaatctgttcattgattaggagagtgaatatgaacttgcatgatgcccatgttaggtttctggaaactgccggggtatcttaattctctagtattctccctctgtggcagttgggctaatacaaagtaactatacgcatgagaatataaaatcagtctctgatacatacacatttttaccatcaaaatttcttaatcatagcaaagacttacctttttatgattaggaattttttttttaatgtatggcagcacatgcctttaatcccaacactagggaggcagaggcaggtggatctctttgagttcgaagccaggctggtctttacagtgagttccaggacagctggagagctacagaatggagagacgctgtctcaaaaacactcaaaacaaacaaacaaaccataccagtttgtaggcagacttctgttgggttgggtttgtactgtttgcctatgcagtgggattacagcagcagcaacaaaaactgtccctgaagtctttctctgccactgtgacctgagtttcctatggtacgcgatttactctaggaaacctcagcccctcaccacgttagctgttggcaaatggcctcacagttgcggaaagtcccaattctaggcttgggaaagcaatgcttagatttgaattggcccatgaagcattcaaatcaaggctaaagacataaatgtgaaataaaactgtgaaccttcattttaacattgatctcacttcccagatttaatcaatatatacttaggtggtattaaaaatggtaaactgcctaatttaaatctcaaaatttaaactatgaggtttacatcaaagccaacatttcacaaatgtactttttaaggtattaaaagaggtatttaagcagtaaatggtttcttggcacccataaccaagtaatagttaagttagaggtgggacttttttattgctatgagaattacatttaaacttttgggtgttttataaaaagcagatttcacaagttttgaaaattgtgacctttactgaaatttgttacctttaatatttcttctagaggataggtatttataaaagaaaaattcgtcagaattgctgcctcaatctagtcccatttgagaaaatttgtttctactgtctcaataactggatgaaatatcactctgaaaacttgcctattgcactaaagctagtttaggcttgataaaacactccaggaggtttttaccacagactgtttctattaaaactgctgcttctcatgtacaattttgttttaaaaggaaccgagtacatctgcaaaacctaagtcttaagggacgtcaggaggtaccttcagaattataggatcaccatggtagtggggattctccatgctggccttgaatgtttgatcttcactgctgaaatgtgggtagctcctcagcgccctgtagagcctgagtctacctagaatagctgtaaccattttgacaagtaatggataagaaaattatccattgagaagctaaaaacaaaacaaaacaaaaccaaagaacgggtgtattttattcttaacctttgtaaaccatcactgagaacacttcagttcttcctaacagctgttatgcttcgatttgaaaaaaatactgagtggataaccaactaccatcatgctttgggtacacctttcaataaaattactgaaatgc

SEQ ID NO: 199 - DNA, 458 bp, rat
ttgaatgcattttttaaattttattgtttttcagtatgacagtgaaaattttacatagcccatgttgaacttagatattcaaataagactttaccaataataaaggagattaatacattgctagagttctacatttgactttatgtcaaaagagtcaatttagctctatgaattacagaagactttgtattctgttccttttagctttattaaatgttgacatctatgattacatcagacttcgatacctcagttcacatctacagaaaattttaaaagtgattctgaatactacagataaaatatttttattgtaggtaattattcaatctgtatatttggcttgatgcatgataagtcatacgggaaaggcatccgcgctatacttgaatttccagaatctagcattctttctttttcaaaatatttttttctttttagcaataatattgacagat

SEQ ID NO: 200 - DNA, 649 bp, rat
tttttttttattattataataaaaatatttattataaaataatcacatttctttgcatataaactaaaaacataaatgtaattcacacattaataagttaagtgggcctaggcatttagcatccatctactagagtttaaagtctcctgtgggttcataaataatagggaaggtattttgatttaatttacacagttgatgctattgagatcttaaagcttttctctattactttacacatagctcgtggtatttgggctaattaaccaaatgccttagatctttggtaaacacaagtattcatgtgcacaaacgtgtagctgaaatttcagtgaaaacatcaataacaaaacaatgatacgagagataacccaaatgccgagagtttgtgtgatcaatcaaagttattgtccacaacttttatggatcacatctgaaatgcaaaacaaatagttgtggctcctgttgtcacaaccagaagcacctcagctctaagtcaccaggaaactaaatacacatttcaaactcaactgatacacaggactgataacattacaatgcagaaaagactttcaacgttaatttgacacaaattaattaattatttcaccttatcttgtaagagtgagacccactgaagaagccacac

SEQ ID NO: 201 - DNA, 3169 bp, rat; identical to SEQ ID NO: 198

SEQ ID NO: 202 - DNA, 3755 bp, rat
gaattccttttttttttaatactagcaactttcattctttggaacttgtgctgaaaaaaagaagagtcagcaaatactactgaaagtgcaatattcgattatcactgcgagatgagctttgatccaaaccttctccacaacaatggacacaacgggtaccccaatggtacttctgcagcactccgtgaaactggggttattgaaaaactgctgacctcttatggatttattcagtgttcagaacggcaagctaggcttttcttccactgttcacagtataatggcaacctccaggacttaaaagtaggagatgatgtggaatttgaagtatcatctgaccggaggactgggaaacctattgctattaaattggtgaagataaaaccagaaatacatcctgaagaacgaatgaatggacaagttgtgtgcgctgttcctcacaacttagagagtaaatctccagctgccccgggtcagagtccaacagggagtgtatgctacgaacgtaatggggaagtattttatctgacttacacctctgaagatgtggaagggaacgttcagctggaaactggagacaaaattaactttgtaattgataacaataaacacactggtgctgtaagtgctcgtaacattatgctgttgaaaaagaaacaagctcgctatcaaggagtagtttgtgccatgaaggaggcgtttggctttattgaaagaggtgatgttgtaaaagagatattctttcactatagtgaatttaaaggtgatctagaaaccctgcagcctggagatgacgtggaattcacaatcaaggacagaaatggtaaagaagttgcaacagatgtcagactattgcctcaaggaacagtcatttttgaagatatcagcattgaacattttgaaggaactgtaaccaaagttatcccaaaagtacccagtaaaaaccagaatgacccattgccaggacgaatcaaagttgactttgtgattcctaaagaacttccctttggagacaaagacacaaaatccaaagtgaccctgctggaaggtgaccatgttaggtttaatatttcaacagaccgacgtgacaaattagaacgagcaaccaacatagaggttctatcaaatacatttcagttcactaatgaagccagagagatgggtgtgattgctgccatgagagatggttttggcttcatcaagtgtgtggaccgtgatgctcgtatgttcttccacttcagtgagattctcgatgggaaccagctccacattgcagatgaagtggagtttactgtggtccctgatatgctctctgcccaaagaaatcatgctattaggattaaaaaacttcccaagggcacggtttcattccattcccattcagatcatcgttttctgggcaccgtagaaaaagaagccactttttctaatcctaaaactacaagcccaaataaaggcaaagacaaggaggcagaagatggcattattgcttatgatgactgtggggtgaaactgactattgcttttcaagccaaggatgtggaaggatctacttctcctcaaataggagataaggttgaatttagtattagtgacaaacagaggcctggacagcagattgcaacttgtgtgagacttttaggtcgtaattctaattccaaaaggctcttgggttatgtggcaactctgaaagataattttggatttattgaaacagctaatcatgataaggagatatttttccattatagtgagttctctggtgatgttgatagcctggaactgggagacatggttgaatacagcttgtccaaaggcaaaggcaataaagtcagtgctgagaaagtaaacaaaactcactcagtgaatggcatcactgaggaagcaaatcccaccatctactctggtaaagtcattcgtcctctgagaggcgttgatccaacacagattgaataccaaggaatgattgagattgtggaggagggggatatgaaaggtgaagtgtatccttttggcatagttgggatggccaacaaaggggattgcctacagaaaggggagagtgttaagttccagttgtgtgtacttggccaaaatgcacaaactatggcctacaacatcacaccccttcgtagggctactgtggagtgtgtgaaagatcagtttggctttattaactatgaagtaggagatagcaagaagctctttttccatgtgaaggaagttcaggatggcattgagctacaggcaggagatgaggtggaattctcagtgatccttaatcagcgcactgggaaatgtagcgcctgtaatgtttggcgagtctgtgaaggccccaaagctgttgcagctcctcgacctgatcggttggttaatcgcttaaagaacatcaccctggatgatgccagtgctccacgtctaatggttcttcgtcagccaaggggaccagataactcaatgggatttggtgcagaaagaaagatccgtcaagctggtgtcattgactaaccacgtccacaaagcacatcattaatccactatggtcaagttggggggattctggtgaagggttctgaatatcttcctcttcatccctcccaaaatctggaatacttattctattgagctattacaccagttttaacaccttcctcgtgttatgtttaaagaaaaaataaataaatttaagaaaccattttaaaattatgcacagttgcagcctggaaaacttaaggtggcgccttatagtgtcaatttaggagctttatttggtgcatttaacgcaactggtaattgcaaattccacttggcctgtgtaagtgaacaaaacagactgttactttgttggccctatgaaattctgcactctagtcagtatatatactctaccttcatgacttaatactcagctgcattcttttccttttttccctctgttcattatgctttaattctgaggaccatatgaaggtagaatatattacctttaaaaattgcaaaatttatatagcaaacgattttcttaagttgatggccaaatgttaaaatgttattttcatatcatttataatcttgtcacaatccacttaacgaagtttgattacatttcagtgaaaattatcttccataataggttttttttttccttcctgggatggggggcaaataactttactacaattagtatgtatggtgcagaatttcatgcaaatgaagtgtgccagcagtgtgataatttaaacatatttaaacaaaagacgaatgcacaaaattgctgctgcttagatcactgcagcttctaggacccagtttcttttactgatttaaaaacaaaatgaaaaaaaaataataaaaaagttgtgcctgaaatgaatcctgttttttttataagtagccccctggttccagtgccctgttgaatacaggcacttgatccttggtgcagcttctgttcaactttgtatcacgggaacggattggcctgatttcttggccttcctcttgaattggccccaaacagggtccctggcaagtggagtgaaggctttttgtctaaagatgacaagggtcagctcaggggttgtgggggagggcgttttcatcttccccgttgtcacttgaggttttgaactctgggtaaagaggccgtttatctttgtaaacacaaaacatttttgctttctccggtttcatgttaatggcgaaagaatggaagcgaataaagttttactgatttttgaaaaaaaaaggaattc

SEQ ID NO: 203 - DNA, 664 bp, rat
ctttcggttcggaggaggcaacggtgcaactttcttcggtcgtcccgaatccgggttcatccgacaccagccacctccaccatgccgcccaagttcgaccccaacgagatcaaagtcgtgtacttgaggtgcaccggaggcgaggtcggcgccacatccgccttggcccctaagatcggtcctctgggtctgtctcccaaaaaagttggtgatgacatcgccaaggctaccggtgactggaaaggcctcaggattacagtgaaactgaccatccagaacagacaggcccagattgaggtggtgccctctgcctctgccctgatcatcaaagccctcaaggagccaccaagagacaggaagaagcagaaaaacattaaacacaatggaaacatcacttttgatgagattgtcaacattgcccggcagatgagacaccggtctttggccagagaactttctggaactatcaaggagatcctgggtactgcacagtctgtgggctgcaatgtggacggccgccaccctcatgacatcatagatgacatcaacagtggtgcggtggagtgcccagctagttaagaagcaacgagaaggggttgggaatttagctcagtggtagagcgcttgccaagcccaaggccctgggttcagtccccagctccgg

SEQ ID NO: 204 - DNA, 664 bp, rat; identical to SEQ ID NO: 203

SEQ ID NO: 205 - DNA, 1066 bp, rat
gtggctgaccgccagatgtctctgctgctccgccgacccccgggtcgagaggcctatcccggtgatgtgttttacctacactctcgcctgctggagagagcagccaagatgaacgattcctttggtggtggctctttgactgccttaccagtcattgaaacacaggctggtgatgtgtccgcctacattccaacaaacgttatttccatcaccgatggacagatcttcttggaaacagaattgttctataaaggcatccgccctgccattaatgtgggcttgtctgtgtcccgtgtcggatctgccgcccagaccagagccatgaagcaggtggcaggcaccatgaagctggagttggcccagtaccgggaggtcgctgcttttgcccagtttggttctgatctggatgctgccactcagcagctcttgagccgtggcgtgcgcctgaccgagctgctaaagcaaggacagtactctcccatggctattgaagaacaggtggctgtcatctatgcaggcgtccggggttatcttgataaactggagcccagtaagatcacaaagttcgagagtgctttcttgtctcatgttgtgagccagcaccagagcctcttgggcaatatcaggtctgatgggaaaatctcagaacagtcggatgcaaagctgaaggaaatcgtaacaaacttcttggctgggtttgaaccttaaagccctgccactgtcaccagacactgctttggttttgtcatttattgtggtaaaatcagcaccatttgtaaaggtttactcttgtactccctgatgtacagaaatcacatgaataaaagttccatattgagtgctagtttgtgtgggacgggctcagatgtatcctgggacttgtggaggtcagagagcagcctgtaggagtcagtgccctcctttccctgggaatttaactcaggttattatttaaagctcgacttcaggggttggggatttagctcagtggtagagcgcttgcctaggaagcgcaaggccctgggttcggtccccagctccggaaaaaaaagaaccaacccgaatt

SEQ ID NO: 206 - DNA, 528 bp, rat; identical to SEQ ID NO: 163

SEQ ID NO: 207 - DNA, 2040 bp, rat
ttactgaattcggatgcagagcatcagaggcccagctagagggacaacacagaggagtaatttgctgacagacctgcagggatggacctgctttcagctctcacactggaaacctgggtcctcctggcagtcgtcctggtgctcctctacggatttgggacccgcacacatggacttttcaagaaacaggggattcctgggcccaaacctctgcctttttttggcactgtgctgaattactatatgggtttatggaaattcgatgtggagtgccataaaaagtatggaaaaatatgggggttgtttgatggtcaaatgcctctgtttgccatcacggacacagaaatgatcaagaatgtgctagtgaaggaatgcttttctgtcttcacaaaccggcgggattttggcccagtggggattatggggaaagctgtctctgtagctaaggatgaggagtggaagagatatagagccttgctgtcccccacgttcaccagtggaagactcaaggagatgttccccatcattgaacagtatggagacattttggtaaagtacttgaagcaagaggcggagacaggcaagcctgtcaccatgaaaaaagtgtttggtgcctacagcatggatgtgatcaccagcacatcatttggagtgaacgtcgattcccttaacaacccaaaggatccttttgtggagaaaaccaagaaattgttaagatttgacttttttgatccgttgttcttgtcagtagtactctttccattcctcaccccaatatatgagatgttaaacatctgcatgttcccaaaagattcaatagaatttttcaaaaaatttgtgtacagaatgaaggaaacccgcctggattctgtgcagaagcatcgagtggattttcttcagctgatgatgaatgctcataatgattctaaagacaaagaatctcatacagccctatccgatatggagatcacagcccagtcaatcatttttatttttgctggatatgaacccaccagcagcacactttcctttgtcctgcattccctggccactcacccagatacacagaagaaactgcaggaggagatcgacagggctctgcccaataaggcacctcccacctatgatactgtgatggaaatggaatacctggatatggtgttgaatgaaaccctcagattgtatccaattggtaatagacttgagagagtctgtaaaaaagatgttgaaatcaatggtgtgtttatgcccaaagggtcagtggtcatgattccatcttatgctcttcaccgtgatccacagcactggccagagcctgaggaatttcgcccagaaaggttcagcaaggagaacaagggcagcattgatccttatgtatatctgccctttggaaatggacccaggaactgcattggcatgaggtttgctctcatgaatatgaaactcgctctcactaaagttctgcaaaacttctccttccagccttgtaaggaaacacagatacctctgaaattaagcagacaaggacttcttcaaccaacaaaacccattattctaaaggttgtgccacgggatgaaatcataactggatcatgattttccctcaaggagttctgctgaattcttcagaaatgtggtgtctaagaacaccagaccctttaatttatgtcatgaataaaattcagatgaaattagggcttaatcgactttgttttgattcggtacatctttgatctttctcagtgtctacaatgtacccatctaatataaaggaaatgacaagtcagtgacagaacaggaacttaacctttggtgattctcacgggactacctccatccacatctggttgtctctgttaatttcttttgatagtaaccttgtctctgtgtaatttgatcaagaactttttcatgaaaatgtgaactattgtgacaactttaattgtagatttggtatcagatgttttagatgcattattctacactaaatgttacatggaaaaaatgtgaataaacacttctttaaaaatccccaggggc

SEQ ID NO: 208 - DNA, 514 bp, rat
ttggattataattagttataaatttattgagaccaatagcaggacaacagtctctgagccaaactagagactgctgtgcaaaggggtgagggtaggttttgtaatggcaaaacccacattgagtgtctgcaccagcaagccaggagctgtgctgctctgcttactaagacctcaaaatagtccttgaatgtctgcaaaagcaggttacagaagccaaaaaagcaggcagacatgtcataacaggtagatggtcatggctgtacatttttgggtaggagttactgagtcaggttcactgggatcttccaggaactggagtcagaaatggctagtgtcaggagtaggttccaagttgaatacctaccatgaaatggagtttccttagccatcacacctggacacagggcatgtcctgctgtgtacctgtaagcatccctatcccactcagtagagcaggtttacccagacttcactggggtgtggctactcgtggtagtgcactctctggtgctgg

SEQ ID NO: 209 - DNA, 2217 bp, rat
tgcccccggagagaaaggtgaaggaggccctcctggtgccgcaggaccccctggtggttctggacctgctggtcctcctgggcctcaaggtgtaaagggtgaacggggcagtcctggcggtcctggtgctgctggctttcccggtggccgtggtcttcctggtcctcccggcaacaatggtaatccagggcccccaggacccagtggtgctcctggcaaggatggccctccaggtcctgcaggtaacagtggttctcctggaaaccctggagtagctggaccaaaaggtgatgctggccaaccaggagagaaggggccacctggtgctcagggtcctccaggatctccaggtccacttggaattgcagggctaactggagcacgaggtcttgctggaccaccaggcatgccaggtccacggggtagccctggacctcagggtatcaagggtgaaagtggaaagccaggagccagtggccataatggggaacgtggtcctcctggaccccaaggtcttcctggtcagcctggtacagctggtgagcccggaagggatggaaaccctggatcagatggtcagccaggtcgagacggatctcctggtggcaagggtgatcgtggtgaaaatggttctcctggtgccccaggcgctcctggtcatccaggaccacctggtcctgttggtccatctggaaaaaatggtgacagaggagaaacgggtcctgctggtccttctggtgctccaggtcctgctggagctcggggtgctcctggtccccaaggtccacgaggtgacaaaggtgaaactggtgaacgtggctctaatggcatcaaaggacatcgaggattccctggcaatccaggtcccccaggttctcccggtgctgctggacaccagggtgcagttggtagtccaggccctgcaggtcccagaggcccagttggtccacatggacctcctggaaaagatggatcaagtggacatccaggtcccattggaccaccagggcctcgaggtaacagaggtgaaagaggatctgagggctcgcccggtcaccctggacagccaggaccccctggaccccctggtgcccctggtccctgctgtggtggcggtgctgccattgctggagttggaggtgaaaagtctggcggcttttcaccatattacggggatgatccaatggatttcaagatcaacactgaggagatcatgtcttcactcaagtctgttaacggacaaatagagagtcttatcagccctgatggttctagaaaaaaccctgctcggaattgcagagacctgaaattctgccaccctgaactcaagagtggagaatactgggttgatcctaaccaaggctgcaagatggatgctataaaagtgttctgtaatatggaaaccggagaaacatgcataaatgccagtcccatgactgtcccgcggaagcactggtggacagatgctggtgctgagaagaaacatgtttggtttggagaatctatgaatggtggctttcagttcagctatggcaatcctgatcttcctgaagatgtccttgatgtacagctggccttcctcagacttctttccagccgggcctcccagaacattacataccactgcaaaaacagcattgcctacatggatcaggccaatggcaatgtaaagaagtctctgaagctgatgggatccaatgagggagaattcaaggctgaaggaaatagcaaattcacttacacagttctagaggatggctgcactaaacacactggtgaatggagcaagacagtctttgaatatcaaacacgcaaggccatgagactccccatcatagatatcgcaccctatgacattggtggtcctgatcaagaatttggtgtggacattggccctgtttgctttttataagccaaactctctgaaaccccagcaaaacaaaaaccacatccatgtgttcctcttgctttaatctcgtcaaccagtgaaagtgaccaactaaattccagttatttatttccaaacttttggaaaaagcataatttgacaaaaatagaatacaatttttttgctgtttcacccaccaatacagttcaaatgcttttgttttatttttttaccaattccaacttcataatgtctcaatggtgctataataaataaacatcaacacttttatgataaaaaaaaaaaaaaaaaaaaaaaaaaaaaaaaaa

SEQ ID NO: 210 - DNA, 6035 bp, rat; identical to SEQ ID NO: 20

SEQ ID NO: 211 - DNA, 1696 bp, rat
atggcagggcctgtgcccacactggggctgctggctgcccttgttgtgtgtggcagctggggcctgaatgaggaacaaaggctgatccagcacctgtttgaggaaaaaggctacaacaaagaacttcggccggtggctcgaaaggaggacatagtggatgtcgccttaagtctgaccctctccaacctcatctccctgaaagaagtggaggagaccctcaccaccaatgtgtggatagatcatgcatggatagacagccggctacaatggaatgccaacgagtttgggaacatcaccgtcctgcgcctgccctctgacatggtgtggctaccagaaattgtactggagaacaacaatgacggctcattccagatttcttacgcctgcaatgtgcttgtttctgactcgggccatgtgacctggctgccacccgccatcttccgctcctcctgccccatctcggtcacctacttccctttcgattggcagaactgctccctcaaattcagttcactcaagtataccgccaaggagatcagacttagcctgaagcaggaggaggaagacaaccgcagttaccccattgagtggatcatcattgaccctgagggtttcacagagaacggtgagtgggaaatagttcaccgggcagccaaggtcaacgtggaccccagtgtcccaatggacagcaccaaccaccaagacgtcaccttctacctcatcatccgccgcaagccgctcttctacatcatcaacatcctggtaccctgtgtgctcatctccttcatgatcaacctggtcttctacctgccaggcgactgtggagagaagacctcggtggccatctcagtgctcctggcccaatctgtcttcctgttgcttatctccaagaggctgccggccacatccatggccattcctttggtaggcaagttcctgctttttggcatggtgctggtcaccatggttgtggtgatctgcgtcatcgtgctcaacatccacttccgaacacccagcacgcatgttctgtctgagggagtcaagaagttcttcctggagaccctgcccaaactcctgcacatgtcccgcccagaagaggaagacccgggccccagggctctcatccggaggaccagctctctgggatacatctccaaggcagaggagtacttctcacttaagtcccgcagtgacctcatgtttgagaagcaatcagagcggcatgggctggcccggcgcctcaccacagcccgcaagccaccagcaagctctgagcaggtccaacaggagcttttcaatgagatgaagccagccgtggatggggcgaacttcatcgtcaaccacatgagggaccagaacagttacaatgaggagaaggacaactggaaccaggtggcccgcacagtggaccgtctctgcttgtttgtggtgacgcccgtcatggtggtgggcacagcctggatcttcctgcagggtgtctacaaccagcccccaccccagcctttccctggggaccccttctcctatgatgaacaggacaggcgcttcatttagagcaggcatgagtaaaacagtcaggcagacggcggtctgagaattgtccttgagcttgtgcctatctggggctgtgtggctgggcagaggtcatgggaggaagagctccctcccaggagcaattcctttctaaataaaggag

SEQ ID NO: 212 - DNA, 678 bp, rat
atgccggtcaaaggaggtagcaagtgcatcaaatacctgctctttggatttaacttcatcttctggctcgccggcatcgcagtgcttgccattggactatggctgcggttcgactctcagaccaagagcatcttcgagcaagaaactaatcattccagcttctacacaggagtgtacattctgattggagctggggccctcatgatgctagttggtttcctgggctgctgtggagctgtacaagagtcacagtgcatgctgggattgttcttcggattcctcttggtgatattcgccattgagatcgccgcagccgtctggggctatacccacaaggacgaggtgattaaagaactccaggagttttacaaggacacctaccaaaagttaaggaacaaggatgagccccagcgggaaacactcaaagccatccatatggcgttgaactgctgtggcatagctggtggtgtggagcagtttatctcggacatctgccccaaaaagcaggttctggaatccttccaggttaagtcctgcccggatgccatcgatgaggtcttccacagcaagttccacatcattggagcagtgggcatcggtatcgccgtggtgatgatcttcggtatgattttcagcatgattctgtgctgcgccatccgcaggagccgagaaatggtc

SEQ ID NO: 213 - DNA, 1178 bp, rat
acattaaccaactgtttagcaactcaggcatgactttgcatttttcttctaatctttcatagaaatttctggccactggacactgtgggagcagcttttaccttattggactatctccccttaagtgggaagggcttagtcaaatgcagtaaagagctataaaacaccgagaactcttgatgtgttgtgaaacttagagggagcagctttttaacaagagaactcaagcaattgctgccatgccggggaagccagtccttcactacttcgatggcagggggagaatggagcccatccggtggctcctggctgcagctggagtagagtttgaagaacaatttctgaaaactcgggatgacctggccaggctaaggaatgatgggagtttgatgttccagcaagtgcccatggtggagattgatgggatgaagctggtgcagaccagagccattctcaactacattgccaccaaatacaacctctatgggaaggacatgaaggagagagccctcatcgacatgtatgcagaaggagtggcggatctggatgaaatagttctccattacccttacattccccctggggagaaagaggcaagtcttgccaaaatcaaggacaaagcaaggaaccgttactttcctgcctttgaaaaggtgttgaagagccatggacaagattatctcgttggcaataggctgagcagggctgatgtttacctagttcaagttctctaccatgtggaagagctggaccccagcgctttggccaacttccctctgctgaaggccctgagaaccagagtcagcaacctccccacagtgaagaagtttcttcagcctggcagccagaggaagccattagaggatgagaaatgtgtagaatctgcagttaagatcttcagttaattcaggcatctatggatacactgtacccacaaagccagccttcgaaagctttgcaacaatcgcatattttgactaaatgttgaccctacttattgggaggccaacacgttttctaatgcttctgtgttaattcatatagacatgactgatgaggaattgctgggatgctatttggttgtagttaaaatttgaaatcatgatcacttcctcagatattactttgaatctcaataaaaacttcgcaagctttttaaaaaaaaaaaaaaaaaaaaa

SEQ ID NO: 214 - DNA, 1374 bp, rat; identical to SEQ ID NO: 48

SEQ ID NO: 215 - DNA, 5721 bp, rat; identical to SEQ ID NO: 81

SEQ ID NO: 216 - DNA, 2572 bp, rat
ggcacgagcgttccctcccctgagataccggcgccatgtccagcgctcggacccccctacccacgctgaacgaaagggacacggagcagcccaccttgggacaccttgattccaagcccagcagtaagtccaacatgctgcggggccgcaactcagccacctctgctgacgagcagccccatattggcaactacagactccttaagaccattggcaagggtaactttgccaaagtgaagttggcccggcacatcctgacggggaaagaggtagctgtgaagatcattgacaagactcagctgaattcctccagcctgcagaaactcttccgagaagtaagaataatgaaggttttgaatcatcccaacatagttaagttatttgaagtgatcgagactgagaagacgctctaccttgtcatggagtatgccagtggcggagaggtatttgattacctagtggcccatggcaggatgaaagaaaaagaagctcgagccaaatttcgccagatagtgtctgctgtgcagtactgtcaccagaagtttattgttcatagagatctaaaggcagaaaacctgctcctggatgctgatatgaacatcaagattgcagactttggctttagtaacgaattcacctttgggaacaagctggatactttctgtggtagtcctccttatgctgccccagaactcttccagggcaaaaagtatgacggtcctgaagtggatgtctggagcctgggcgtcatcctctatacactggtcagcgggtccctgccttttgatggacagaacctcaaggagctacgggaaagggtactgagggggaaataccgtattccattctacatgtccacggactgtgaaaatctgcttaagaaatttctcatacttaatcctagtaagagaggcactttggagcaaattatgaaagatcggtggatgaatgtgggccatgaggatgacgagctaaagccttacgtggagccactccctgactacaaggatccccggcggacagagttgatggtgtcaatgggttacacacgggaagagatccaggactcgctggtaggccagaggtacaacgaagtgatggctacctatctgctccttggctacaagagctctgagctggaaggtgacaccatcactttaaagccccggccttcagctgatctaaccaacagcagtgccccatctccatcccacaaagttcagcgcagcgtctctgccaaccccaagcagcggcgctccagtgaccaggccgtccccgccattcccacctcgaattcctactctaagaagactcagagtaacaacgcagaaaataagcggcctgaggaagagacagggcggaaagccagcagcaccgccaaagtgcctgccagccctctgcctggcctggacaggaagaagaccactcctaccccctccacaaacagcgtcctctccaccagcacaaacagaagcaggaactccccacttttggacagggccagccttggccaggcctccatccagaatggtaaagacagcacagccccccagcgtgtccctgtcgcctccccctccgcccacaacatcagcagcagtagtggagccccagaccgaactaatttcccacggggtgtgtccagtcgaagcaccttccatgctgggcagctccgacaggtgcgggaccagcagaatctgcccttcggtgtgaccccagcctcaccctctggccatagccagggccggcggggggcctctggcagcatcttcagcaagttcacctccaagtttgtccgcaggaacctgaatgaacctgaaagcaaagaccgagtggagacgctcagacctcacgtggtaggcggtggaggcactgacaaggaaaaggaagaatttcgggaggccaagcctcgttccctgcgcttcacttggagcatgaagaccacgagctctatggagcccaatgagatgatgcgggagatccgcaaggtgctggacgccaacagctgccaaagcgagctgcacgagcgatacatgctgctgtgcgtgcatggcacacccggccacgagaactttgtgcagtgggagatggaggtgtgcaaactgccccggctgtctctcaacggtgttcggtttaagcggatatcgggcacttccatggccttcaaaaacattgcctccaaaatagccaatgagctgaagctttaacaggctgtcaggaggggcggcagaggcccaccagtggacttggctgcttgggccaaacctgcatcccctgggagaaaaactgcaggatgaattggtgtgtctcccctgctggcacttgtccccttccaggcccttctcagttttttcttccatgtttgtgggggatgggaagtggtggttcctcctcccacattcacccctgcccagaagtctctcccttcccctctacccccgtacaggaggcaaaggaaggggaaggggttgggggggcagggctccccctcggtactgcggttgcacagagtatttcgcctaaaccaagaaaatttttattaccaaaaagaaaaaaagaaaaaaaaactcgtgcc

SEQ ID NO: 217 - DNA, 330 bp, rat
gacattcagggtgcctctttggggccaaggaaagagtgcgaccccgagaatcatgccaaggcttccccctatcctgcggctgctccaagcgcccgagaagtacacagtgattcctaaagcccgtatctcttccaagccagccaaatctcccacttccgccatggatcaggctgtggggatgtcagtcatagtcgctggcttcatggttccagcaggatgggtcttatcccacttggagagctataagagaagctccgcagcatgaggagctcggcgcatccctgagaggccaattaaacgcttccagtacctccaaaaaaaaaaaaagaa

SEQ ID NO: 218 - DNA, 1842 bp, rat; identical to SEQ ID NO: 103

SEQ ID NO: 219 - DNA, 513 bp, rat
ttaaagtttttactaaatgtttattttatgttcaagataaagcctatacacaattgaatgtggaaataaataactagaaatgctctggaaactctatttgcccttcaaattcatttttttaaggtcatgaatttttatttaaatcaatatgccaaatataaacactaagaaaagaagaactacatcttagtacagaaacgtaatcttctctgactaagggtttagctggcattatgataacgaaaacacacaagatacaacactttagcaggctgactcagacggctctgctggagaagaaaaaggcacagactgaaggacaatggtgaagagcagaggacatgggctcagtcacctgacacagagaactcagtcaggacaagtgaacacaatcagtgctaaatgacttctttaaattaagatgtataaacataggctataaaggcattacttttggaagcatctttgcatatttcttctatatataaatctttgtatacaatttccatgttc

SEQ ID NO: 220 - DNA, 522 bp, rat
ttcaaaaagtggatgaaactttattattgtcttcaatgtacagtacaatcattagtcaaatatcaagtacttgaaatagcataatagaatcacatatttaaatgcaaagcaaagagataatgtgtaattttataagcaaattatcaaataaaaagacaacattggctgactgttgacttttcaaatatactccactcaacacccaagaaaatgttttatactataaaattcttctatatattttgaggaattttctaatataacaaaatttatatgaaaaatgaaatttaaaaattgttagaaaacactaaatatgagcccaatgtagaaatctgaagatagactgttcctttggcagaaaataaatagctacaaacatcttaaaataagtacagttcaataggatcatggaaaaaatatatctttacatttcgtattaatactgaaatcagatcaatacagatttactatcatttttaggctatcaataactctgcaacacaaatttatgaatggaaaaaa

SEQ ID NO: 221 - DNA, 522 bp, rat; identical to SEQ ID NO: 220

SEQ ID NO: 222 - DNA, 1861 bp, rat
aaaggttcggggaggaagacaaagaggatccgagtgggatcccttccactcggtgtgacgcaggtggaagagacagtcgcagtttcgaagcaatatggattataaatctggcttgattccggacggaaatgctatggagaacctggagaagcagctcatctgccccatctgccttgagatgtttaccaagcctgtggtcatcctgccctgccagcacaacctctgccggaagtgtgccaacgacatcttccaggctgccaatccctactggaccaaccgcggtggctcggtgtccatgtctggaggtcgtttccgctgcccctcgtgccgccatgaagtgatcatggaccggcatggggtgtacggtctgcagaggaacctgctggtggagaacatcatcgacatctacaagcaggaatgctccagtcggcccctgcagaaaggcagccacccgatgtgcaaggaacacgaagacgagaaaatcaacatctactgtctcacgtgcgaggtgcctacttgctccttgtgcaaggtgttcggggctcaccaggcctgtgaagttgcccccttacaaagcatcttccaaggacagaagactgaactgagcaattgcatctccatgctggtggcagggaacgaccgagttcagactatcatctcgcagctggaggactcctgccgagtgaccaaggaaaacagccaccaggtgaaggaggaactgagccacaagtttgacgccctctacgccatcctggacgagaagaagagtgagctgctgcagcggatcactcaggagcaggaggagaagctggacttcatcgaggccctgatcctccagtaccgagagcagttggaaaagtcgaccaagcttgtggaaacagccatccagtccctggatgagcccggaggggccaccttcctcttgagtgccaagccgctcatcaagagcattgtagaagcttccaagggctgccagctggggaagacagaacaaggctttgagaacatggactactttactctgaatttagaacacatagcagaggccttgagggccatcgactttgggacagatgaggaggaggagtttactgaagaggaggaggaggaggatcaagaagagggcgtgtccacagagggacaccaatgaagaactggatgagtgagacgccctctggatgcagagatgggggaggggcgggacaggcccatctcgggatggggttagggctccttgggggcaccatagggaagtgtgtcttctctctgctcagagagcagggactagcatagaagccccaccattgtgtccagcagctgctgaaacacgattggaaatgtatccaaaaatgtcccaggacacttttttacgttggtgcaaaatgaaatattttgtatgtttttaaaatgtgatttttgtataaacttgtatatgtatgccaatttggtgctttttgtacaagaacttttgtatgatcatgcctggtcattgtgtgaccagcgattgtcacaaagggggaaggaagccaagttcattgagctgcccacttcctttccttggcgggagggttgggtctcactcaaaggcctagaaaggggcaatgtactgtacttcagtacccatccccaaacacggggagaggactgaatttgtgttatatgttgttttaataaatgcagaaggggctgggtattgggggtgcacaccctttgatcccagcactctggaggcagaggcagttggatctctatgagttcgaggctagcctggtctacatggagagttccagaccagccagggcaacatagagagactttctgtctcaaaaataaaaaaataaaaaactttccagcacaatgg

SEQ ID NO: 223 - DNA, 557 bp, rat
ttacattgtctgcttttattccttccagccacagagcccaaaggagcagcctttccctggtagggcaaggaggcaaggatggagttgcccacgcccaggggacctgcagtctggatgaacacgaagaccagctccttactgaacgccctccatcatcttcagaaactcgtcgaagtcaatgcggccatcgttgttcttatcaccatccttcatcagggattcgatctcctcgtctgtcacatgctccccagaagcccggaaaatctcagccagctcctcggcatcaatgtaaccgactgcgttcctgtcaaagatgcggaaacactcagccagttcctcttcgctcttccctttcgcatcctctttcatctggcgcaccatcatgaccaagaactcttcaaagtcgatggtaccgctgccatcctcgtccacctcctcgatgatggcgtccagatcctctttggtgggtgtctgccctagcatcctcatcacggtacccagctctttaacgctgatgtccccaccaccatcagcatcaaacccggacccgtacctgc

SEQ ID NO: 224 - DNA, 1544 bp, rat
cgcgatctagaacccgactgtcatccttcaggaaagaactcatcggtccaatgtctgaccatgcagatgtgagcctcccaccccaagaccgggtgaggattctgtcgcaactcggtagtgcagttgagttaaatgaagacattccgccccgtcgctactttcgttccggtgttgagatcatccgcatggcatccatttactctgaagaaggcaacattgaacatgcctttatcctctacaacaagtacatcacgctgtttattgaaaaacttccaaaacaccgagactacaaatcggccatcattcccgagaagaaagacgcggtcaagaaattaaagaatgtcgctttccctaaagcggaagagctgaagacagaactcttgaagagatacaccaaagagtatgagcagtataaggagcgaaagaagaaggaagaagaggaacttgcccgaaatatcgccatccagcaagaactggaaaaagaaaagcagagagttgcacagcagaagcagaagcagctcgagcaggagcagttccatgcctttgagaagatgatccagaagcaggagctagagaaagagcggctaaaaattgttcaagagttcgggaaggtagaccctggcccgtgcgggcctctgctccctgatctggaaaagccctgtgtagatgtggcccccagttcacctttctcgcccacgcagacttcagactgtaacacaaccctgaggccagctaagccacctgtggtggacaggtccctcaaacctggagcattaagcgtcatagaaaatgttcccaccattgaaggcctgcgccacattgtggtgccccgcaatctgtgctcagaatttctccagcttgccagcgccaacactgccaaaggcatcgagacctgtggagtcctctgtggaaaactgatgagaaatgaattcacaatcacacatgttctcatccccagacaaaatggtgggcctgattattgccacacagagaatgaagaagaaattttctttatgcaggatgatcttggactcctcactcttggctggatccacacccatccaacccaaacggcctttctgtccagtgtggatctgcacacgcactgctcctaccaaatgatgttaccagagtccatagcaattgtctgctcccccaagttccaggagactggattctttaaattaactgactatggccttcaagagatttcaacctgccggcagaaaggctttcacccccatggcagagacccaccgctgttctgtgactgcagccatgtcactgtcaaagacagaattgtgacgatcacagaccttcgataaatctcagtcatgaaccaggaggtggcccactgggtaaacacacttgccaccaagcccaacagcccaagttctattgctgggatccccccaagttgtcctctaacctccatttgtgtactgtggtatgtgtgtacccacatatacacacacagacacagacacacacacatattaattaatttaaaacaaataaatgtaaattacaaaaaaaaaaaaaaa

SEQ ID NO: 225 - DNA, 5925 bp, rat; identical to SEQ ID NO: 3

SEQ ID NO: 226 - DNA, 5736 bp, rat
aaaagaaagaagccagaacataccaccagccctttgagtatacaacataacaaacgtcattactttacaacttgattaggagacagtacagagatctgaaggatggctgacgagaggaaagacgaaggaaaggcaccacactggacatcagcctcactcacagaggcagctgcacacccccactcgccagagatgaaggaccagggtggctcaggggaagggctgagccgcagcgccaatggatttccatacagagaggaggaggaaggcgcctttggggagcacgggtcacagggcacctattcagataccaaagagaacgggatcaacggagagctgacctcagctgacagagaaacagcagaggaagtgtctgcaaggatagttcaagtagtcacagctgaagctgtagcagtcctgaaaggtgaacaagagaaggaggcccaacacaaggatcagcctgcagctctgcctttagcagctgaagaaacagttaatctgccaccttccccaccaccatcgccagcatcagaacaaacagctgcactggaagaagcctcgaagatggaattccctgagcagcagaaattgccttcctcattcgctgagcctttagacaaggaggaaacggagtttaagatgcaaagtaagcctggtgaagactttgaacatgctgccttagttcctcagccggacacaagtaaaactccccaggataaaaaggatccccaagacatggaaggagaaaagtcgcctgccagtccatttgcgcagactttcggtaccaacctggaagacataaaacagatcacagaaccaagcataacagtacctagcattggcctctccgcagagcccctagctccaaaagatcagaaagactggttcatcgaaatgcccgtggaatcaaagaaggatgaatggggtttagctgccccaatatctcctggccccttgacacccatgagggaaaaagatgtgctggaggatatcccaagatgggaaggaaagcagtttgactctcccatgcctagccccttccacagtggaagtttcactcttcccttagatactgtgaaagatgagagagtcacagaagggtcacaaccctttgcccctgtcttcttccaatcagatgacaaaatgtctctgcaggacaccagtggttcagctacttccaaagagagttctaaagatgaggagccacagaaagataaagcagacaaagtggcagatgttcctgtctcagaagctaccactgtactgggagatgttcacagtccagctgtggaaggctttgtcggggagaacatttcaggagaagaaaagggtaccacagatcaagagaaaaaagagacttcgacacccagtgtacaggaacctacactcactgaaactgaaccacagacaaagcttgaagagacatcaaaggtttccatcgaagaaactgtggcaaaagaagaggaatccttgaaattaaaagatgataaagcaggtgtaattcagacttccaccgagcattctttctccaaagaagaccagaaaggcgaagaacagacaatcgaagcattaaaacaagactcctttcctataagtctagaacaggcagttacagatgcagccatggccaccaagaccttggaaaaggttacgtctgagccagaggcagtaagtgaaaagagagaaatccagggactttttgaagaggatatagctgacaagagtaagctcgaaggcgctgggtctgcaacagtagccgaggttgagatgccattttatgaagataaatcagggatgtccaagtactttgaaacatctgcattgaaagaagatgtgaccagaagcactgggttgggcagtgattactacgagctgagtgactcaagaggaaatgcccaggaatctcttgatactgtatctcccaagaaccaacaagatgaaaaggaacttctggcaaaagcttcccagcctagtcctccagcacacgaagcagggtacagcactcttgcccagagttatacatctgatcatccgtccgagttacctgaagaaccaagttctcctcaagaaagaatgttcactattgaccccaaagtttatggggagaaaagggaccttcatagtaagaacaaagatgatctgacacttagtcgaagcttggggctgggcggaaggtctgcaatagaacagagaagcatgtccattaacttgcctatgtcttgccttgattctattgcccttgggtttaactttggccggggccatgatctttcccctctggcttctgatattctaaccaacactagcggaacgatggatgaaggagatgattacctgccccccaccacacctgcagtggagaagattccttgctttccaatagagagcaaagaggaagaagataagacagagcaagcaaaagtgactggagggcaaactacccaagttgaaacatcctccgagtcacccttcccagccaaagaatattacaaaaatggcactgtcatggcccctgacctgcctgagatgctagatctagcagggaccaggtccagattagcttctgtgagtgcagatgctgaggttgccaggaggaaatcagtcccatcggaggctgtggttgcagagagcagtactggtttgccacctgttgctgatgacagccaacccgtaaaaccagacagtcaacttgaagacatggggtactgtgtgttcaacaagtacacagtccctctcccatcgccagttcaagacagtgagaatttgtcaggagagagtggttcgttttatgaaggaaccgatgacaaagtccgtagagatttggccactgacctttcactaattgaggtaaaacttgcagctgctggaagagtcaaagatgaattcactgctgagaaagaggcatctccaccctcttctgctgacaaatcaggactgagtagggagtttgaccaagacaggaaagctaatgacaagctggatactgtcctagaaaagagcgaagagcatgttgattcaaaagaacatgccaaggagtcagaagaggttggggataaagtagagctcttcggattaggtgtaacctatgagcaaacctctgccaaagaactgataacaactaaagaaacagcacctgagagagcagagaaaggtctcagttcagtgccagaggtagctgaggtagaaacaaccacaaaagctgaccaaggtctagatgttgctgccaagaaagatgatcagagtccattagatataaaagtcagtgactttggacagatggcttctgggatgagtgtagatgctgggaaaaccatagagcttaagttcgaggttgatcagcagctgactctctcatccgaagcacctcaggaaacagattcattcatgggtattgagtccagccacgtgaaggatggtgccaaagtcagtgaaacagaagtcaaagagaaggtggcaaagcctgacttggtgcatcaggaggctgtggacaaagaagagtcctatgagtctagtggtgagcatgaaagcctcaccatggagtccctgaagcctgatgagggcaagaaagaaacatctccagagacatcactgatacaagatgaagttgccctcaaactgtctgtagaaatcccttgcccacctccagtttccgaagctgattcatccattgatgagaaggcggaggtccagatggaatttattcagctgccaaaggaagagagcacagagactccggatatacctgccataccttctgatgtcacccagccacagcctgaagcagttgtgtccgaaccagcagaggttcgaggtgaggaagaagagatcgaagctgagggagaatatgacaaactgctcttccgctcagacaccctccagatcaccgacctgcttgttccaggaagtagggaggagtttgtggagacctgcccaggggagcacaaaggtgtggttgagtccgtggtaaccatcgaggatgatttcatcactgtagtacaaaccacgactgatgagggagagttgggatcccacagtgtgcgctttgcagctccagttcagcctgaggaagaaaggagaccataccctcatgatgaagagcttgaagtactgatggcagcagaagcccaggcagagcccaaggatggctctccagatgctccagctacccctgagaaagaagaggttccattctcagaatataaaacagaaacctacgacgattacaaagatgagaccaccattgatgactccattatggatgccgacagcctgtgggtggacactcaagatgatgatagaagcatcttgacagagcagttagaaactattcctaaagaggagagagctgagaaggaagctcggagaccgtctctcgagaaacatagaaaagaaaaaccttttaaaactgggagaggcagaatttccactcctgaaagaaaagtagctaaaaaggaacctagcacggtctccagggatgaagtgagaaggaaaaaagcagtttataagaaggctgaacttgctaaaaaatcagaagttcaggcccactctccttccaggaaactcattttaaaacctgctatcaaatacactagaccaactcatctctcctgtgttaagcggaaaaccacagcaacaagtggtgaatcagctcaggctcccagtgcgtttaaacaggcgaaggacaaagtcactgatggaataaccaagagcccagaaaaacgttcttccctcccaagaccttcctccatcctccctcctcgcaggggcgtatcaggagacagggaggagaactcgttctctctgaacagctccatctcttcagcacgacggaccaccaggtcagaaccaattcgcagagcaggaaaaagcggcacctcaacacctactacccctggatctactgcaatcacccctggcactcctccaagctactcttcacgtaccccaggcacccctggaaccccgagctatcccaggacaccaggaacccccaaatttggcatcttggtgcccagtgagaagaaagttgccatcattcgcactcctccaaagtccccagctactcccaagcagcttcggctcattaaccaacctctgccagacctgaagaacgtcaagtccaaaatcggatcaaccgacaacatcaaataccagcctaaggggggtcaggtacaaattgttactaagaagatagacttaagccatgtgacttccaaatgtggctctctaaagaacatccgtcacaggccaggtggtggacgcgtgaagattgagagtgtaaagctggatttcaaggagaaggcccaagctaaagttggctcacttgacaatgctcaccatgtacctggaggtggtaacgtgaagattgacagccaaaagctgaacttccgagagcatgcaaaggcccgcgtcgaccacggggctgagatcatcacacagtcgccaagcaggtcaagcgtggcgtctccccggcgactcagcaatgtctcctcttctggaagcatcaacctgctcgaatcccctcagctggccactttggctgaggacgtcactgcggcgctcgctaagcagggcttgtgaatccttctcatctagcactgaagtaccatttaggcatgagctcttggcaggagtgggctctgagcaggtgtcatattcattctttacaaaccatagataaataatctcatcccccaactgtagtaattgttacaattttatataaaaaaaaaaaaa

SEQ ID NO: 227 - DNA, 395 bp, rat
cctcttaaggtcctcagtcggagcatggccagcgcatccaaaggagaccacggaggcgcaggagccaacacttggcgcctcctgacctttgtgctggctctccccagcgtagctctctgctcgcttaactgctggatgcacgctggccaccatgagcgcccagaattcatcccctatcaccacctccgcatccgaaccaagcccttctcctggggggatgggaaccacacgcttttccacaatccccacgtcaatcctttgcccaccggctacgagcagccttgaagactcagcagacgtactctgccacagtctcaaactgacctccataccggctctaagggcccctgaggttccagtggacagttccaagcgcaataaaggtgtgaaacttt

SEQ ID NO: 228 - DNA, 2757 bp, rat
gccagcgaggagagctaaaactacaagagtggatcatgacccatgaagagcatcatgaagccaaaaccctggggatcggcaaggccatcgccgtgttgacctctggtggagatgcccaaggtatgaatgctacggtcagggctgtggtacgagttggcatcttcaccgggctccgcgtcttctttgtccatgagggttaccaaggcctggtggatggtggagagcacatcagggaggccacctgggagagcgtgtccatgatgctccagctgggaggcacggtgattggaagtgcccgatgcaaggacttccgggagcgagaaggacgactccgagctgcccacaacctggtgaagcgggggatcaccaatctgtgtgtcatcggaggcgatggcagcctcactggggctgacacttttcgttcagagtggagtgacttattgaatgacctccagaaagatgggaagatcacagccgaggagcgtacaaagtccagctacctgaacatcgttttcctggttggctcaatcgacaatgacttctgtggcactgatatgaccattggtactgactctgccctgcaccgcattgtagagatcgtggacgccatcaccaccaccgctcagagccaccagaggacatttgtgttagaagtgatgggccgccactgtggatacctggcccttgtcacctctctgtcgtgtggggccgactgggttttcattcccgagtgtccgccagatgacgactgggaagaacacctttgtcgccgtctcagtgagacaagaacccgtggttctcgtctcaacatcatcattgttgctgagggtgcaatcgacaaaaacgggaagccaatcacctcagaagacatcaagaacctggtggtaaagcgtcttggatatgataccagggtcactgttctgggacatgtacagaggggtgggacaccatcagcctttgaccggatcctgggcagcaggatgggtgtggaagcagtgatggcacttttggaggggaccccagacaccccagcctgtgtggtgagcctctctggtaatacggctgtgcgcctgcccctcatggagtgtgtccaggtgaccaaagacgtgaccaaggctatggatgagaagagatttgatgaagccattaagctgagaggccggagcttcatgaacaactgggaggtatacaagcttctagctcatgtcagacccccagtctctaagggcgggttgcacacggtggctgtgatgaacgtgggggccccagctgctggaatgaatgctgcagttcgctctactgtgaggattggccttatccaaggcaaccgagtgctggtcgtgcatgatggctttgagggtctggccaaaggtcagattgaggaagctggctggagctatgttggaggctggactggtcaaggtggttccaaacttggtactaaaaggactctacccaagaagaacctggaacagatcagtgccaacataaccaagtataacatccagggcctggttatcattgggggctttgaggcttacacagggggcttggagctgatggagggcaggaagcagtttgatgagctctgcatcccatttgtggtcattcccgccacggtttccaataatgtcccagggtcagacttcagcatcggggctgacacagcactgaacaccatctgcacgacctgtgaccgaatcaagcagtctgcagcaggcaccaagcggcgagtgtttatcatcgagacgatgggtggttactgtggctatctggccaccatggcaggactggcggctggggctgatgctgcctacatttttgaggagcccttcaccatccgagatctccaggttaatgttgaacatctggtgcagaagatgaaaacaactgtgaagagaggcctggtgctgaggaatgagaagtgcaacgagaactacactactgatttcattttcaacctgtactctgaggaggggaagggcatcttcgacagcaggaagaacgtgcttggccacatgcagcagggtggaaacccaactccctttgacaggaattttgccaccaagatgggtgctaaggctacgaattggatgtctgggaaaatcaaagagagttaccgtaatggacggatctttgccaacactcccgactcaggttgtgttctggggatgcgtaagagggccctggtctttcagccagtgactgagctgaaggaccagacagattttgagcaccgaatccccaaagaacagtggtggctgaagctgaggccaatcctcaaaatcctggccaagtacgagattgatctggacacctctgaccacgcccacctggagcacatttccaggaagcggtctggagaagctgctgtctagaccactttggagtgaggggaaaatcacctgatcatggtcagctcacaccctggtagacctcagcccatggcttctcagtgttgtagcccagcccctacccttctaggtttccctgtactctgtacctgcaaccaggatcactgtggccaggtgttgggggaggggtggtgagtgcctctcctaggtagctgtccttccttgcaccctggcttcatctgtcacacaggctggatgtctctagtgctactgctagatttcagcttctcaagagtaaaagtgagctttatttatttctttgtgataacaaagagtcctaggtcctttccttgtaccacagtgaagtgtaactacactaataaaagccagctggccactgtga

SEQ ID NO: 229 - DNA, 5736 bp, rat; identical to SEQ ID NO: 226

SEQ ID NO: 230 - DNA, 330 bp, rat; identical to SEQ ID NO: 217

SEQ ID NO: 231 - DNA, 1749 bp, rat
cccgggcaggtccaggggttcagccacaagagggaaaaacatagactaacggctgccaacatgatggtttttcgagtagaggagctggtaacgggcaaaaagaacagcaatgggtcctcaggggagttccttcctggcgagttcagaaatggagagtatgaagctgctgttgccttggagaaacaagaggacttgaagacacttccagccaacagtgtgaacctgggggaagaacaacggaaaagtgagaaagttcgagaggcagagctcaaaaagaaaaaactagaacaaagatcaaagcttgaaaacttagaagaccttgaaataattgttcaactgaagaaaagaaaaaaatacaagaaaactaaagttccagttgtgaaggaaccggagcctgaaattattactgaacctgtggatgtgccaaggtttctgaaagctgcactggagaacaaactgccagttgtagagaaattcctgtcagacaagaacagccccgacgtctgcgatgagtataaacggaccgctctccatagagcatgcttagaaggacacttggcgatcgtggagaagttaatggaggctggagcccagattgaattccgagatatgctggaatccacagccatccactgggcatgtcgtggaggaaacctggatgtcctgaaactgttgctaaacaaaggtgccaaaatcagtgcccgagacaagctgctcagcacagcgctgcacgtggcggtgaggaccggtcactacgagtgtgctgagcacctcatcgcctgcgaggcggatctcaatgccaaggacagagaaggagacacccctctgcatgatgcggtgaggttgaatcgctacaagatgatccggctcttgatgaccttcggtgcggacctcaatgtcaagaactgtgctgggaagatccctatggatctggtgttgcactggcagaatggaaccaaagcgatattcgacagcctcaaggagaatgcctacaaaaactcgcgcatagctacgttctgaggaaagagactcgacaggagctgttctcagccgttttcaaaacatttcccagcagcggagcaaccagctataacacccagcttttgtttgccagccaaatagggagataagctttaaagacgcttcatggaaggaccctgggttagagatgctaacatgtcctctagcgatgctcaccatttttatctgctcctatttatttatttatttatttcatagcactggtagtcaggttttcatgagcatcattttgggggagcaagacttaatctgtgtgtaacattcggagtcttcccgtggctctaaaaccgcgtgggtgaatggtgtctaatctcccttttgtgtcctcacttgcattaaagctactcaaggtatttttgaaagccaagggttggtcggtcgctgcagcccttctctggattctcactgctgatatccgaatgaagcagcagaaggtgtacaggaatgcagaaggggatgggagcagttctgcaggacctaagccgtggctcgccaggcacccacaggtgtggtttgccggatcacacagtgccgaggtgaaggccacgtcaggagcgtgtgtggagggggatggagggagtaggcaatggggcctcactaacctgaggtcgatgagaggaaaaagtccaaaaggacatgccctgtaaatgtgtaaatggtattgtgttgtatgcatattttatattcctaataaatgcaaactaattc

SEQ ID NO: 232 - DNA, 946 bp, rat
  misc_feature (138)..(138): n is a, c, g, or t
atggcggcgacggcgagtcccggggctggccggatggacgggaaaccccgtacctcccctaagtctgtcaagttcctgtttgggggcctggctgggatgggcgctaccgtttttgtgcagcccctggacctggtgaanaaccggatgcagttgagtggtgagggcgctaagactcgagagtacaaaaccagtttccatgccctcactagcatcctgaaggcagaagggctgaggggcatttacactgggttgtcagccggcctactgcgccaggccacctacaccactacacgtcttggtatatatacagtgttgtttgagcgcctgactggggctgacggtacaccccctggctttctcctgaaagccctgattggcatgactgcaggtgcaactggtgcatttgtgggaccaccagctgaggtggccctcatcaggatgactgctgatggccggcttccagctgaccagcgccgtggctacaaaaatgtgtttaatgccctaattagaattgcaagggaagaaggagtccccacactgtggcggggctgcatccctaccatggctcgagctgttgtcgtcaatgctgcccaacttgcttcttactcccaatccaagcaattcttgctggactcaggctacttctctgacaacattctgtgccacttctgcgccatcatgatcagtggcctggtcaccactgctgcttccatgcctgtggatattgtcaaaactaggatccaaaatatgcgaatgattgatgagaagccagagtacaagaatgggctggatgtattgctgaaagtcgtccgctatgagggtttcttcagcctgtggaagggcttcacaccatactatgcccgactgggcccccacactgtcctcaccttcatcttcttggaacagatgaacaaggcctacaagcgtctcttcctcagtggctgag

SEQ ID NO: 233 - DNA, 1624 bp, rat; identical to SEQ ID NO: 109

SEQ ID NO: 234 - DNA, 628 bp, rat
ggcttcttcttgacaactgttcgcagcactgtttattcaaacgtgtaataacaagcaccacaaaacaacatgcaacattctccccatgccctcaatctgcaatcccagaagtaggagacccaccatcaggatgttgatgggaactcatgtctaagaaaggtcctagatggtcatctccacatggtcagagtctaccagggcaaagggcaagttccccgcttgttggcctcctgcgatagctagagaaaccagacaccttctcctagtccaggcctgactagacaaagtactggtgccagccctggttggagaggacatgagtcttatgaggacagagctgcccttggcacgcaggctgcccagccccctggaggtaatgaggtgaactggtctttcctctgagggcagccatggagagaaaggccatagcctaaattaaggctcttttggccatagccagactcttgctgaagaaaagccttctcaaccctagagagagctctggagtaagagtgctcactgggagtggacagctccctttctaaagtaattgatgggccagttgctaccttatgccctaaatgagaacactgtttccatcacaattcaaataaattataaatatgga

SEQ ID NO: 235 - DNA, 3043 bp, rat
ggaagacagaagcgtgggagtggagaaagtggcacaaaccagagccctggagatactctggaaacgcggagcagattgtgttggaaagctggcaacagcggtggtctcgggcgcggcgggagggcaggctgggtcgggggcgggcagtgtgtcgtcaggagctgggcggccccgcggcggccgcgtcttcctagcccatcccctcaagcccagctcgggctccggcgccccagctccgaccgtgcgctctcctgggtcaagttagagcccaccgagagccccgcgccactcgcgcactctcgcacccgggcagaaggactgcggaaggggccgccccacgggctgggtgagggctgcagcgtccagagaaggaagcgttgacagctggagccggctgctggaagggtttgcgccgggacgcgggggttgccgtagcgctacgcaagacggggcttaccctctgaaaagcaaacataagaggctgtacaaccaggttatctctgcgatcagcctcaagcagagaagaaagatggccaaagacaagggcctcatcagcccagaagactttgcccagctgcaaaagtacatagactactccaccaaaagtgtcagcgatgtgctgaaggtctttgagatgaacaaatattgccaaggagatgagattgggtacctgggatttgaacagttcctgaaaatgtatctggaagtggaggaggttccccatcacctatgctggactctgttttggtccttccatagcagtcaagacttggatgaggagactgagtcaaaagccaatgtgatctgtctcagtgacgtctactgctacttcaccctcctggaaggcggcagtccggaagacaagctagagttcaccttcaagctgtacgacatggacagaaatgggatcctagacagcacagaagtagaaaaaatcatcctgcaaatgatgagagtggctgaatatctggactgggatgtgtctgagctgagaccgatccttcaggagatgatgaaagagatggaccgggatggcagtggctgtgtctccctagctgagtgggtccgggctggggctaccactgtgcccctgcttgtccttctggggatagacatgactatgaaagatgatggacaccatatatggagacccaagagattctccagaccggtctactgcaacctgtgcgagttgagcattggcctcggcaaacaaggcctgagctgtaacctctgtaagtacattgttcatgaccactgtgccatgaaggcccagccttgtgaagtcagcacctatgccaagtctcggaaagacattggtgtccagccacacgtatgggttcgaggaggctgtcattctggacgctgcgaccgctgtcagaaaaagatccggacctaccacagcctaacgggactgcactgcgtgtggtgccacctggagatccacgatgactgtctgcaggctgttggtcccgagtgtgactgtggactgctccgtgatcatatcctgcctccgtgttctatctaccccagggtcctggtatctggacaggagtgcaaacagaagaccacagatgttacgagcctgtgcacccctgaggcttttcggattgaacctgtttctaacacccacccccttctggtcttcatcaatcctaagagcggaggcaagcaggggcagagcgtgctttggaagttccagtacattctgaaccctcggcaggtgtttaacctgaaggatggtccggagccagggctcaggtttttcaaagacgttcctcagttccgggtgttggtgtgtggtggagacggcaccgtaggctggattctagagaccattgacaaagccaactttcccattgtgcctccagtcgctgtgttgcccctgggcactggaaatgacctggctcggtgcctaagatggggaagaggttatgaaggtgagaacttgagaaagattctcaaggatatagagataagtaaggtggtatatctcgatcgatggctcctggaagtgataccccaacaaaacggagaaaagagtgatccagttccctctcaaatcatcaataactacttctccattggtgtggatgcttccattgctcaccggttccatctcatgagagagaaataccctgagaagttcaatagcagaatgaagaacaagctttggtacttggagtttgccacatcggagtccatcttctcaacgtgcaaaaagctggaagagtcagtgaccgtcgagatatgtgggaagctgctggatctgagtgacctgtccctcgaaggcattgcggtattgaatatcccgagcatgcatggtggctccaatctctggggtgacaccaagagacctcacggggatacgtgtgggatcaaccaggcactgggcagtgtggccaaaataatcacagaccccgatattctcaaaacctgtgtgccagacatgagtgacaagcggctggaagtcgtaggaatagagggtgtgattgagatgggtcagatctataccaggctcaagagtgctggacaccggctggccaagtgctccgagatcacgttccagaccacaaaaaccctccctatgcaagttgatggagaaccctggatgcaagcaccctgtacaatcaagatcacccataagaaccagatgcctatgctaatgggtccggctcccagttcctccaatttctttggcttttggagctgaggatggatgccatctgccttgagcccacctccctgttcctggagatttcccactatctagatgctgccacaccttcctgccagcccagaaggatgttccatcaccttcacagtatttattatcctccgccacctcactgctcccacacagacatccttacacaaccagcgatgcgtaaccttgaaaatgcctcatctaataaagtgactttttccatcactgggatatctgttaaaatgagcgacacatctctttttacaccttcacccctctacagacagatttaaaagcagacagaacaaataaatgaacaaagaaagcctaaaaaaa

SEQ ID NO: 236 - DNA, 386 bp, rat
tttttttttttttttttctattacactcagtcatctttattagatacagcccaggttagtttttcttaaaacagcgatagtgccacatgaattattcatgcactcccaatacgtgtgtctcaatctcgttagcaggtgataaaaaagataacatcatctcaaaaaaataaaaatgtccttcagtgtcttgctttgctttaatgttctctataaaataattataatgaagagctaattctttttcattttgttcatgggggaaagaggaagagaaagcaccttgctgtgtagcccaggctgcacttgaactcacgatgctcctgtctcagattctcattgccatgcctcactcttgaagggttcttttttttcatttttcctcgtgc

SEQ ID NO: 237 - DNA, 2905 bp, rat
ggcccagtggagcagagccgagccaagagcctgagcaagatgatgatggttatgcagcccgagggtctgggggccggggaggggcccttctctggtggcgggggcggtgagtacatggaacaggaggaagactgggaccgcgacttgctgttggatcctgcctgggagaaacagcagcggaaaaccttcactgcatggtgcaactcccatctgcgcaaggcaggcacacagatcgagaacattgaagaggacttccgcaatggcctgaagctcatgctgctcctggaggtcatttctggagagaggctgcccaggccagacaaaggcaagatgcgcttccacaaaatcgccaatgtcaacaaagccctggacttcattgccagcaaaggagttaagctagtgtccatcggtgctgaagaaattgttgacgggaacctgaagatgaccctgggcatgatctggaccatcatcctccgctttgccattcaggacatctctgtagaagagacctcagccaaagaaggcttgcttctctggtgtcagcggaaaacagcaccataccgcaatgtcaacgtacagaacttccataccagctggaaggatggcctggccctctgtgctctcatccaccgccaccggccagatctcattgactatgccaagcttcgcaaggatgaccccattggaaacctgaacactgcctttgaggtggcagagaaatacctggacatccctaagatgctggatgcagaagatattgtgaacacccccaaaccagatgagaaagccatcatgacctatgtttcctgcttctaccatgcatttgctggggctgagcaggcagagactgctgccaacaggatctgcaaggtcttagctgtgaaccaggaaaacgagaagctgatggaggagtatgagaaactggctagtgagctgttggagtggatccgccgcactgtcccatggctagagaaccgagtgggtgaacccagcatgagtgccatgcagcgcaagctggaggacttccgcgactacaggcgcctgcacaagcctccccgtgtgcaggagaagtgccagctggagatcaacttcaacacgctgcagaccaagctgcgcctgagccaccgacctgctttcatgccctcagagggcaagctggtttcggacatagccaatgcgtggcggggactggagcaggtggagaagggctatgaggactggctgctttcagagatcaggcgtctgcagaggcttcagcacctggctgagaagttccagcagaaggcttccctgcatgaagcttggacccggggcaaagaggaaatgttaaaccagcatgactacgagtcagcttcgctgcaggaggtgcgtgcgctcttgcgacgtcatgaggcctttgagagcgacttggctgcacatcaagaccgggtggaacacattgcagccctggcccaggaactcaatgagctggactaccatgaggcagcctcggtgaatagccgctgccaagccatctgcgaccagtgggataacttgggtacactgacccagaagaggagggatgcactagagagaatggagaagctcctggaaaccattgaccagctgcagctggagtttgctcggcgggcagcgcccttcaacaactggctggatggggctattgaggacctgcaggatgtgtggctagtgcactctgtagaagagacgcagagcctgctaacagcacatgaacagttcaaggcaacgttgcctgaggcggatcgagagcgaggtgccatcctgggcattcaaggagagattcagaagatctgtcagacgtatggactgcggccaaagtctggcaacccctacatcaccctcagctcgcaggacatcaacaataagtgggacacggtcagaaagctggtacccagccgtgaccagacactgcaggaggagctggcccggcagcaggtgaatgagaggctccggcgacagtttgcagcccaggccaatgccataggaccctggatccagggaaaggtggaggaagtagggcggctggcagctgggctggctggctctctggaggagcagatggcaggtctgcgacagcaggagcagaacatcatcaattacaagagcaacatcgaccggctggagggtgaccaccagctgctgcaggagggcctagtctttgacaacaagcacacggtctacagcatggagcacatccgtgtgggctgggagcagctgctcacctccattgcccgcaccatcaatgaggtggagaaccaggtactgacccgagatgccaagggcctgagccaggaacagctcaacgagttccgggcatctttcaaccactttgaccggaagcggaatgggatgatggaacctgatgatttccgagcttgcctcatctccatgggctatgatctgggagaggtggagtttgctcggatcatgaccatggtggaccccaatgcagctggggtcgtgaccttccaagccttcattgacttcatgacccgagagactgcagagacagacacagctgaacaagttgtagcctccttcaaaatcctagcaggagacaagaactacattaccccagaagagctgcggagggagctcccagccgagcaggctgagtactgcatccgtcggatggcaccctacaaaggatcgggggctccgtccggggccctggactacgtggctttctctagtgccctctacggagagagtgacctctgacattcttagtggagaagaggagagggcacttcctgtggtggattccactgtccctcagagcaagggcttcaaatcatccagcaccaaccacatttctgaataaagatcgggttgtgggcctctcccaaaaaaaaaaaaaaaaaaaaaaaaaaaaaaaaaaaaa

SEQ ID NO: 238 - DNA, 426 bp, rat
gaggtgcagatagcttgctttattattattattttttaatctcaaggaggtccaacatttataactaccaattgaacatatgctggcatgaaaaagactacatcaaatcagtaattttttatgggcagttggtagtatggttttaacaacagcttcattggtggtgatgcttctcttattttgctgtggctcattgcttggttgcccagtttccagtgaaatttaaatttagaactaccacacgaggcatctgctgcacccgggacctccaggagttgacactgctctggcataagaatacatgaatagcttggttaatcgaggggatggccaggagatggtacttttcccaagccatccacgcactctttatgtcagagacagcgtgcagtgagcgaacaaagtgttggccgttacactttgctc

SEQ ID NO: 239 - DNA, 472 bp, rat
attttcatgtattttatttttaaaacacttaaaattttgcaagctagcagtaaaatattgcccttaatattttactaattagcaccgtatagcttttaaagctacctggaacattgtttcactgtaaatgactgtaaaataagatgtcaaattagtctcaacataagatcataaattaaatcattatttttttggctctaggcacatatgtgtactttaaagatgaatttaactacattaatgtatttggccaatctaaaactcaaagtataatagtttaaagcagcacttaatctttgaaattattctaaaaaagcatataaagaaattgagaaatcagctataaaaaaaaaaggtcactcctttactttttaaaaatctcttaatatttggaagaataacaaaataacttggtgaaaaagtcctttggtgcaaagatcagtttaaacatatggtttagcatacaccattc

SEQ ID NO: 240 - DNA, 438 bp, rat
aaccagggcactccaccttccctcaggggatagatgaagtatacttgtcatgtaagtcagctacattgtcactggagacacggatccagccatcctcccgcacatggtagaggttgactgctcctccggagtaggcatctctgtaggtggcttggtagatggctcggcgggccaggtcataggcctcctccacttgtaggtcataggagtagcctcgatccatgctgaaacttgaaggccagggtggtggttccatgaagcatttcgattcgtggctcctccgggacaccccagctcggcgcggctaggctcagcccatcaccaggactccccggacccaagtccagcagatctgcacgacctccgagtccaaaaaacccgtgctgattcaccggcatcggccgctgcaacacgctggccagcgccatgtttagcaag

SEQ ID NO: 241 - DNA, 616 bp, rat
gagagaaacaacaccacaaatgagtggctgactttattcatccagctcttggcagatccttttggtatggacagatgttgctgcagcttccggcatgggcctcgagtgcagggggtagtttggggaaagtccagagggcacggcagacaaacgccatgcttactgggctcttcttgcaaacgaatgtggaagattagaattatgttctcacaccaccagcttggcttaaatacttctctgacaaaaataataataataaattatcttcaactcagaaaataaattgtgttcagcagggtgacaggagggtccattcgtcgcattgcaccacagggctaccaggagaggacagacaggcaggataccaacacaggggtcacagggcacagggcccgcctgaagtgggtaaacatgtgcctttgtctccaggcaggtggcagccctggctgtgtcatccacaggagacggggcctccttcctcctcacgtgcgcctggtcttctgattcttggtttgtctcttcatgtcttctgggccactgctgtcagaggccgcctggccaaaggctctgactccctgaagacgactcgtcagttgcagcagcaaagggatgagct

SEQ ID NO: 242 - DNA, 404 bp, rat
acacaggttccttacatctttattgaactgggaatggaacccggtgctgctcctgcccagcaaactccacccctgccctcttttcactatgtgcacagtcccggcaagccttgcacacttgtctcaccctcctgagtgggtagaatagcatgcctgtgcacttagcgtgcagtttctgtgttacgagaactgcacgaatagctacggagtccagtgcacatgacgggtgggggtggggttccattctgctgttccaccagtccagcctgtgtggggaacaccggggcacggaaggtactggcaaaggctccggagggtggcgctggctggagaaggccaggctgaacactgcccatctcgtacccaggccctgaggctataccattgggctggaatgggttggt

SEQ ID NO: 243 - DNA, 348 bp, rat
tttttttttttttttttggtgagtagtcagtttaatgagaaaacattgatctgtataaaaagttgctttgtgtgtcaagtgtccttatttctgaggagtcgtcatattgagtagtcttgaatgtctgttgcccacggcaccagtgtcgcggtgcacgctggctggcatgaacagggcagggcctgccccatggaaagatacgtgcccctaggggggaacactagtcaggttcttcacatagtaacaatggccagagaggccaaagttaatcagaaaatagctgctgcaaaacgggcgtcagctgggggctccatgcgggaggcagagcctccacctttcagcccctca

SEQ ID NO: 244 - DNA, 410 bp, rat
agaacaacaaatcaaaatgtaaacttaaaatataaccaaaagagggacagctctttaggaaaaggaaaaaaccttaaatagtgaataaacaactacaaccacttaaccattgtaggcttaaaagcagccatcaataaagaaagcgttcaagctcaacatacatacttacacacactaattccacaaacctcaataaattcctatattacaaattgggctaatctatagacccatagatgaaatactgttaatatgagtaacaagaaccaattctcctagcacaagtgtatgacaacccggataaccattgtcaattatcgaatcataggtactaacccaacaataaaattacctatccctaactcgttagcccaacacaggcgtgctttaaggaaagattaacaaaaaaa

SEQ ID NO: 245 - DNA, 407 bp, rat
tttttttttttttttgtcttaataattgttcaaaattaatttccagttttccaggcgttagagattcttgagagactcctttataaatctctggggaatcatcatctaataccatgcttctcctggcttcagcaaatgccttcttctcctgttccattctctttctctaatatattgttcttttcttctttgcttttcatctctagatcgcctttgatttctttcttccctggccctctgcatggcttcaaatttatcctttacatctcccttgccgagttttggcacataggatttggggacaggtttagatgaagaaagcagaatctctgccttctgtgacacgtcattcatgtttgctatgtgtggtttcagactgaagccttgtatattcttgtacccgcctg

SEQ ID NO: 246 - DNA, 335 bp, rat
tttttttttttttttttaaaaagctacaagatgagttgagtggtttacacggagactgtgggattgtgggtaagaatcaaatgttaagcaccagttttaatcaagtttgttctgtattattagatctttgattttcattttcctcatgtcaactcaattcagcaactctgcccaagttgccacaagcttcttccttcgtggctttcctgggggaccccagcagcgtgtgcttggcttctgcggcatgtctgtgtgcccacgtgttgcgcactgtcctgtgttccatctgatctgccacacctggtgttcgtgtgcgtcttcagacctgtggtcca

SEQ ID NO: 247 - DNA, 322 bp, rat
tttttttttttttttttaagcttttttttttattaaaatactgtcatacccagtggaatgcttcggcaatcctggtacagagtggcgtgacaaaacagccatgtttgcaccttaaatattcatgataacttaaacacacagacacacgtcatggtctttggcagaaaacgttcacagcacaaaaaaaaaaaaaaaaaaaataccaaatattaatccaaaatatattaagttgttttttttctttcacgatattttttgtttttccctcctttttttttgttttttttttaaacttttatctttgtaaacaacgcacatgaac

SEQ ID NO: 248 - DNA, 439 bp, rat
tttttttttttttttttaatttcacagatttttaaaagattcttaatattttatataattagaaatacacatttcaaaaacaaaacttctacaaagagaaaacagttatgttggttagcaaagcatggagttcctcatggcttagggtagtgcgttctatacaaaaagtccttggtggggtttacaggactgtttaaaatagtagcgaagctattgaggggaaaaacacattttggcttaagtaaactacaaatagccacaaatgctttgcaaactctttcttaccttttatatgaaaataagcaaaatgtaatgtacatatttttatatttttatttaataagagatgcagacccagatttatttatttaattaaatacgttagctctcagacaccacacttttttttccttttcttttaaagtgggtatgggcctct

SEQ ID NO: 249 - DNA, 356 bp, rat
tttttttttttttttgtaatcacacgaggaagatttattgtgagcgagatgaaacgagagctcaggccagcatgctggggtcgagactcatacaccacacagggagtagaggagttcgaccccgacctgaattttcacagagcttataaaggaaaaaaccacaaaccagggggatcaagagggagggaggaggggaattccaaaaccataaactgcccatacaatttaggactttgtgacattgtgattaggggtagtgacattttacagggccattggaccattgtggccggaggctatgggtcattgtggctgttccaggaaacctttcatgcaagaatgttccgggaaccatt

SEQ ID NO: 250 - DNA, 420 bp, rat
cagccgccgggggccgagggcgcgcgcgggggcgagggagcggcgtgggcgctgggcgcgcggcttcccaagtggcccgctgttcccaacactcgcccgggctctctactccagtccccgcggccggtcactgtccagaccttcccgatcgtccgggtaaccagctccgtagccgcggattgtgcaagccttttgcactcaccccgcgtggaagtaaaaaaaaaaaaaattttccccttaaatgcagagagggtggcggtctccaagtccaaaagaggtagatgttcctttctcagaaaatcgagtggctggggtgggaaaggggttggctcagaggctaccttgtcccgggggcgcggaggtggcagctgggggcgcggtgctgggcccggctcgggctggggaccgtccctcctgctt

SEQ ID NO: 251 - DNA, 442 bp, rat
ggagattttatttcctttattgagaaacttaagtcttgggtacatcaaaaccaatttctgggagaggggaaaaaaaaacagaactcataatagaaaaaaaagttaccatcatctgggccacaacagaacccagagaatatattcttataattgaaaaattctaggtgcttcataattgaccttttgatacaaaatgacctgttgaatttgtaacttggttcttgaaagaggtccacagacaaactaggaagtcttcagacctcagctgaatgccgtgaggggttatttggcttttgactccttctgggcagcttctttcttggcatgatgagcctgcaggactgccacagcttcatccaccttggaacggagggactcgggggactccagcatgtggagcagctcagagttgtcgatttctagcagcatccctgtaaatttt

SEQ ID NO: 252 - DNA, 526 bp, rat
cttgcggccgcatgtattttttttttttttttttgcattttaaaacggctaactttattgtcattgaaaagataggcttaactttatttgatctaagtctcttgatttacagaataggatcataaccactacaaagaccacatacattagccaaaagtaattcttcttgagcaatctgccaaacccatgtagccatcttattcaacacatgccattaaccacaaaggaggtcagaaggatttgaaagcttcttttaacccactcttactaccagaagaaaatgtacatgcttccaacccttctcctaatgtcaatgggcggcactcgaaagaagaacttctaaaggttgtggcaggccaaaatcagtgacaatgaacccacagcgaatagttccctttgaaaatactttctgtaagaaggaacatatcctaagtaacacattccatgtatgaaggagcatgtaagataacagactgtatggctaacagatatgagcatttattaaagttagcgcatacatccatac

SEQ ID NO: 253 - DNA, 510 bp, rat
aggatcataaagaggcgtggttttaattgataacaatcttcttcatacaatattgcacaaattaaggatgtatcaacaattctatttatgatacagactcatcaacattcatataaaactatgagttggtacaatttggtggcagatactttagtaaatagcacagatattaaactcggctacgtgagactcagcctccacagaagaattcacaggtcactaagatgtccgacccaagtccatcaagaccacttaaagagaaacttgggatccaggtcaggtgtggtagcacatgcctctgaacgtggaagcaggaggattgttgtgggttcaaggctggcctgtagtatacagcaaaaccatggctcaaaaaactggtgatgaccacattaaagaaacttagaagcttcctctgggaagcagggagcatctgcaccctggcaactgtaagtgtgtgcatgttctgccccccaggtgccgtgctgagagggacccctctgctgcagatct

SEQ ID NO: 254 - DNA, 471 bp, rat
tttttttttttttttgtagaatgatatgcaatttattcatatactgacagttaggcagtactcaaaatttatttaaataagcaagtgattacacaaacatctaataatactaaaattgatcgtcccaaagtataaaataccacaggtatgaaacaccatggtaaacactattcaacagactacagtcataattccaaactaaatcacatttgaaagaagatgattctcagttgtttgaggatgattttgtttttctccttcccagcaacttcttccactgatataaggacgctaatttcaagaaatagtgcatgatatcatcgcttaggttcctgtgttgtagcacatttttcttgcaaacaattttaaaatattgcctccccacccccaagataaaaacaaagcagtcagcactcaatccctaagcaaggatactgagatctggggagtgctaagaactaagtatgggtt

SEQ ID NO: 255 - DNA, 441 bp, rat
tttttttttttttttttccaaggagagaggatttatttgtgttccctgggacgggaacagggagagtccagaagagccaaagtttcaaggacacaaccaggttcagagagtctagagaacccgggtgcactcctaccacggggtccagttggattaggagaacaggcatgggcaactctgtgcaaagccagtgtctactccacgtccttcatgaactccaggaactcgtcatagtcgattcggccatcgttgttcttgtcaccgtccttcatgagctcttcgatgtcatcttccgtgatggtctcacctgtggcctgcagcatcatcttcagttcatccaagtcaatgtagccatcagcgtttttgtcaaacatgcggaagagattcgacagctcctcctcagacttccctttggcgtcatccttcatgcaccgaaccatc

SEQ ID NO: 256 - DNA, 301 bp, rat
aaatctcttactcctataggcaccaataaaggacaatttaagggtttttaatctacaatttctgtagtaaaaaaatacattaggaaatgatttcaaggaagaaggccagagaatgtcgtagtggtgctaaaagagagcagaagcgaggccgagttggaagctgatgaagtaagttcttagggattgtgtctacatctggcactctgtcagaacagaggcacactgctgtgggcttgagtgtggtgggtcactgttactgtggtgatggtgcatttctgatggcagccttgggaactggcct

SEQ ID NO: 257 - DNA, 452 bp, rat
tttttttttttttttttgaaaatgtactaaaatttaatcatccataaaagctgtaatttaatctgacagtaaacacaagaagcaatattagagttggtttagtatagtatatattttagctttgaaagccatagaaatcagttatcccagtgtttccctataaaagacccatttttccaaagcattattcacaaacaattttaattagaatataatgacagatgatattttcataatttttaaatataaaatgaagtcaatgactcaaaaaagttatctgctgcaatgagtttgaggggagatttcataatctatatcattacagataaaaagtatgacggttcagctttttagtgcttggcagggaggagtcatgataaaaacgtcaatatgaaatcatttgattatagtagtaacatctaacatttgaaatgcatccatgctcttctgta

SEQ ID NO: 258 - DNA, 534 bp, rat
ggggatacaaaaggcacctctccctgtacctgaggactcatcaatcaacagatgagccccaggtgggtggagcccttgctggaggaacaaagcaaggataggggaaaggcagtggaggaactgggggctctgggcacccagaatccccgaggtctcatcttgacacctgggcagtgaggtctttcctcactgggtgcagcttcgtacctggacagtgggcagctcagcaggggccaccattgcccttcctaataagccactaaagccctcttcaggctccactctgcagggggatgggataggccaggctgtggtgatgtcttctctaatgcctagactggtagtgtagattctgaagggctcctgtgggcttctctggggaagggagcaggggaattccatggaagcagccttacaccaggtcaattaggtcgcatcaggtcagctcgtccggggccccaggtctcagtaaagtcatagtcggtagcaagatgggaagaaggcagaaccagtcaggatcccagtggagggttt

SEQ ID NO: 259 - DNA, 286 bp, rat
gagatgcaggcaggaagacgaaattaaactaggcctgaggagcgatgcgacaggcatgatggaagtcgagtcctcctactcggacttcatctcctgtgaccggacaggccgtcggaatgcagtccctgacatccagggtgactcggaggccgtgagcgtgcggaagctagctggagacatgggcgagctcgcacttgagggggcagaaggacaggcagagggaagtaccccagacaaggaagccagcagccagccggagagcagtgacgcgaacacctcatcctga

SEQ ID NO: 260 - DNA, 390 bp, rat
cattaattcaaaagattttatgaggggtggtttaatgacaatatgataaaaagcacaagtgtctgtttcagttaaaactctgccctgaagatgaaggggctatgttcctccttgtttacgtgtgcagagcaaggattgccaccttcggtcttggccgtcaccttccccccttccctgctctgcacggttgctttcacataggactccttagcatccaccacaaacactgatgacttggcatcaaaaggcttgttctgagcctcgattcgctccttttcagacttccggaggtaaggagcagcctccccaaaaacggccatctcggcgtcggaactcatggctgcgagctattgggggcagcttaaggccaggtgcacctcttgtgttacc

SEQ ID NO: 261 - DNA, 562 bp, rat
cggagctggggaccgaacccagggccttgcgcttcctaggtaagcgctctaccactgagctaaatccccagcccctgtttgttgtttttttaacctagtgattcagtgggtttttctactaaattttctcccttggaatttgatttcttaattaacattttattttgagaattttcagaaagagtggggaatccaattaggtagtcaggtatatgcattctttttttaccatatctagcatgagtattaagggatctttggggatatgattccccttagcaatccacgattggtaagacctaggtgacacgcacacacactcacactcacacacactcacacacacacacacacacacacggtatgacattgcccagcacagccactgtgtggtatgacactacaaacattccttacagagaatcatcagccaagggctcactgccttccagggtctaaagaatgtctttgtccctcagtaaaacttcaggccccagtcccatctaaaagacacacaaaaggagctcaaactcaacttatgagacaaccctacacacatgcc

SEQ ID NO: 262 - DNA, 1896 bp, rat
ctgaggcggagggtgcgccgcgcgggtccggagaactgcacatcgaatccttcgaaccatgagcaactacaatgtgtcattggttggcccagctccttggggtttccggctccaaggtggcaaggatttcaacatgcctctgacaatctctagtctgaaagatggtggcaaggcatcacaggcacacgtcagaataggcgatgtggttctcagcattgatggaatcagtgcccagggaatgactcatctcgaagcgcagaacaagattaaggcttgtacaggctccttgaatatgactctgcaaagagcttctgctgctgccaagtctgagccagttgctgtccagaagggggaacctaaggaagtagttaagcctgtgcccattacatctcctgctgtatccaaagtcacttccacaaccaacatggcttacaataaagtgccacggccctttggctctgtgtcttcaccaaaagtcacatccatcccatcgccatcgtccgccttcaccccagcccatgccgccacgtcatcacacgcttcccctccacctgtggctgctgtcactccccctccactctctgcatccggactgcatgctagtgccaatcctagtgctgcccagtgttcgtctccaccaaacactggtaaacctgcagttcatgtcccacggcagcccacagtcaccagcgtgtgttccgagtctgctcaggagctagcagagggacagagaagaggatcccagggtgacattaaacagcaaaatggcccaccaagaaaacacatcgtggagcgcaacacggagttttatcacatacccactcacagtgatgccagcaagaaaaggctgattgaggacactgaggactggcgcccacggactggaacgacacagtctcgttccttccgaatcctcgcccagatcactgggactgagcatttgaaagaatctgagaatgacaatgcgaagaaggcaaatagcactccggagccttctcagcagtcagcttcacctctgagcgcggcggagagcctggagagcccaggttcaaacaggccagtggtggctggcctcaggtccgctgctgctttcaagcctgtaggatccaccagtgtcaagtcaccaagctggcagcgtccaaaccaagcagcaccttctactgggagaatttcaaacagtgcaagctcttcaggtacaggggcacccatgaagccagctgtggggccaccccagccaagtgaccaagacactcttgtgcagagagctgagcacattccggcgggcaagcggactcccatgtgtgcccactgcaaccaggccatcaggggaccttttctcgtggctctggggaagtcctggcatccagaagaattcaactgtgctcactgcaaaaacacgatggcctatataggctttgtggaggagaagggagcactgtattgtgagctatgttatgagaagttctttgctcctgaatgtggccggtgccagaggaagatccttggggaagtcatcaatgctttgaagcagacctggcacgtgtcctgttttgtgtgtgtggcctgtggaaaacccatccgtaataatgttttccacttggaagatggcgagccctactgtgagacagactattatgcactttttggaacaatatgtcgcgggtgtgaattccccatagaggctggtgacatgttcctggaagctctgggctccacctggcatgacacttgctttgtgtgctccgtgtgttgtgaaagtttggaagggcagacatttttctccaagaaggacaagccactttgcaaaaaacatgctcattctgtgaatttctgaaaatcaacagttccaggaaagagaagaaatttgaaaaaaaaaaaaaaaaaaaaaaaaaaaaa

SEQ ID NO: 263 - DNA, 367 bp, rat
ctggggtcctatgtgtgttttcaaccttttcccatcaggcagttagtagtagccactttgggttcctgtggacgtgcctcagcttctcggcataggaacccaacaggtagaatacttgaaacttctcagtggccaagacctcgataccctctctgatgggtgggaactgggctattttcctgaccaatctaggccaccattttagtccctggtcacattccttactccaaactgaaattcagtttggctttgagtatgtgcacacgtggtgggttcacctacttcagtgttgaccaaaagtttatttttctagtgcatttttctaaatggtaaaaatatgtaattttagtatgcatgactgggtctc

SEQ ID NO: 264 - DNA, 385 bp, rat
tttttttttttttttttgccttttcaatctgctttattaggttcacaatatgtcatatggaccttcccatgcatctgataaaagaattacaggccgagtaaaaaacacaagtttcacttagaagttggtaacaggaagagatctacataaaaggagtaacctcaaaacttgtacatcacaaagcaggggtccccatagcatcttcagagacaacctcaggactcagggcataaggcaaaactcatcattgtggtcatggtgaggggggtcagtgctcaccgcccgcagactatggctcagctgcctttccctcaacttgcccatgaggtgtctcatatcctccccaaacctttgcacattctcatctctcatcctgccctgggcc

SEQ ID NO: 265 - DNA, 218 bp, rat
tttttttttttttttttggtacgaaatcacctttattcacaaacacagtgacccagttcacaaaggaggcaatgctacctctgaactatcaggatggacaatggcttcttttcccatctccagccactcagctctgtactggggcctttcccccaccgctaggatgagccccagctcgacgtgccagctccagcctgaaagaacctaccagggccagt

SEQ ID NO: 266 - DNA, 200 bp, rat
tttttttttttttttttctgtcatactgtccttttattgtgtacaggtgatagagactagtctcccacgaacccctcccccctcccctccctatctgaagggtcccaagactgctggagccagaggcgcctgggaccccaactaacagtgagcttcccccttttacacctgcttttacacgtggagtctgagtcagagcc

SEQ ID NO: 267 - DNA, 228 bp, rat
tttttttttttttttttaagtgtgcacaggtaggcttttattactaaaccctatgatatacaaaatgcatactcgaataacagctaaaaaaatagttcagcgaatatgaaatacatatttttgaaatgataaaaatgtaacacgaacatacaaaatgttgcatatatatacacaatatatacttatatatatatatcacatgatgaaaactgtaaataagaaatgtgt

SEQ ID NO: 268 - DNA, 486 bp, rat
tttttttttttttttttggagcataggccttttattttgtcccagacatttgacaatgtaaacatacataaaatacatattaaagtttagatgctctttatactttgtgcagtaagttgaagccttaaaaaggaaacatttcatttaaaaaaaaagtcattagttttacttaagacaggaaaatagcagcaagtaccaagacattgtgcacttcttttaattaagacaagttacttcatttacatcaaagtcagaaatacaatactggctttcttgaatacatagtatagcttgaatcactggttagataagggcctattttcccaactgtacatcagggaggaaggttctccttcatttcagaaactgcagaccctcagcctgccagcatgaccacagcattgagcattaaaaggagtgaggcatttactttccaagcactagccgaggaaggtggctgagtctttacatttgcagttgtttctt

SEQ ID NO: 269 - DNA, 462 bp, rat
tttttttttttttttttcattcataaatttattccccccctccccttgcaggaatatgtaacgctgcagtgagcaggggtcagaaccgtggacgctgctctggccctctgccctgcagaggcttcaggaaccacacaccgcaccacactgcttcctgcactgtcgctgtgggtgaggccgccacagacctcgccttctccacagacgccagggacaggtgaaggctctacagggccaggttggggacagaggcctactttcatgcttgggtgacccgaaggtgacatttcatctcggtgcctgtttcctcccaagcaagcagaacaaatattattcctacggggttctttgaggaacaacagactaacagtgaagccagtctgctggaggaatgactgacctgatggggctcagcgcccttcacctgtcttggctttgctgttaatgctgaggactgaccca

SEQ ID NO: 270 - DNA, 5264 bp, rat
gtataagaggaagaacacaaaggtttgcagcagccaggcagaacaccaagggatcaagatgccgcctacagtgaggtggtcagcctggtgcacaggatggctgtggatctttggggcagctctgggccagtgcctggggtatggctcagagcagcaaagggtagcatttcttcagcatccagggcaaaaccatctgcaagcaagttatatggagcttagacccagccagggctgtcgcccaggatactatcgagacatcaaaagcttccctgcgggaaggtctgttccctgcaattgcaacggacattcaaatagatgccaagacggctcgggagtgtgcattaactgtcagcacaacacagctggggagcactgtgagcgttgcaagaggggttactatggaagcgccatccatggatcctgcagggtttgcccctgtcctcacaccaacagctttgccactggctgtgctgtggatggaggagctgtgaggtgtgcctgcaaacccggatacacaggagcacagtgtgagaggtgtgcaccaggatattttgggaacccccagaaatttggaggtagctgccaaccatgcaattgcaacagtaatggccagtttggcacttgtgatcccctaactggagactgtgtaagccaagaacccaaagatggcagccctgcagaagaatgtgatgactgtgacagctgtgtgatgactctcctaaatgacttggtccccatgggtgaggaactcgccctggtgaaatcaaaacttcaggggctgagtgtgaacactggttctctggaacagatccggcatgtggagatgcaggccaaggacctgaggaaccagctgcttggcttccgttccgccatctccagtcacgggtcccaaatggacggcctggaaaaagaactcagtcatttgtaccaggaattcgaaactttgcaagaaaaggcgcaggtcaattccagaaaagcacaaacattatataacaacatcgatacgacaatccaaaacgccaaagagttggacatgaagattaaaaacatacttacgaatgtgcacattctcctgaagcagatcgctcggccaggtggagaaggaatggacttgccggtgggcgactggtccagggagtcggcggaagctcagcgcatgttgcgggagctgcgaggccgagactttaaaaagcacctccaagaagcagaggcccagaaaatggaagcccagctcttactgaaccgaatcaggacctggctggaatcccaccaggtggagaacaatggactgctaaagaatattcgggattcattaaatgattatgaagccaaacttcaggacctgcgttccgtgcttcaggaggcggcagcccagggaaagcaggctacaggcctcaaccacgaaaatgagggggtcctaggagccatccagagacaaatgaaggaaatggattccctgaagaagtacctcaccgagcacctggccacagcagacgcttccctgctgcaaaccaacagtctactgcagcggatggacacgagccagaaggagtatgaaagcttagctgctgctttaaacggagcaagacaggaactgaatgaccaagtgcgggaactctccagatccggaggcaaagcacccctggtggctgaggccgagaagcacgctcagtctttacaggagctggcaaagcagctggaagagataaagagaaacaccagtggggatgagtcggtgcgctgtgtcgtggacgctgccactgcctatgagagcatcctcaacgccatccgagcagcagaggatgcagccggcaaggccgacagtgcctcagagtccgccttccagacagtgataaaggaagatcttccgagaagagccaaaaccctgagttctgacagcgaggaactgttaaacgaggccaagatgacacggaaaaggctacagcaagaaatcaatccagctctcaacagcctacagcaaaccctgaagactgtatcagttcagaaggacctgctagatgccaatgtcactgctgtccgtaatgaccttcgtgggatccagagaggtgatattgacagtgtggtgagtggagcgaagagcatggtcaggaaagccaatgggataacgagcgaggtcctggacgggctcagccccatccagacggatttgggaaggattaaggacagctacgggagcacacggcatgaggacttcaacaaagctctgattgacgccaataactcagtaaagaaattaaccaagaagttgcctgatctttttgtcaagattgaaagcatcaatcaacagttgctgcccctgggaaacatctctgacaatgtagaccgaatccgagagctcattacgcaggccagagatgctgcgaacaaggttgcaattcccatgaggttcaatggtaaatctggtgttgaagtccgtctgccaaatgacctagaagacttgaagggatacacgtctctgtctttgttcctccaaagaccagacttaagagagaatggaggcactgaggacatgtttgtaatgtaccttggaaacaaggatgcctccaaggactacatcggcatggcggttgtagatggccagctgacgtgtgtctacaacctgggggaccgagaagctgaagttcagatcgatcaggtcctgacggagagtgagtctcaggaggcagttatggaccgggtgaagttccagagaatatatcaatttgccaagcttaattacaccaaagaagccacgtccaataaacccaaagctcccgcggtctacgacctggagggtggcagtagcaacacgctccttaatttggatcccgaggacgctgtgttttatgtcggaggttacccaccggattttgaacttcctagcagactgcggttccctccatacaaaggctgtatcgaactagatgacctcaatgaaaacgttctaagcttgtacaatttcaagacaactttcaatctcaacaccacggaggtggagccttgtaggaggagaaaggaagagtcagacaaaaattactttgaaggtacaggctatgctcgcatccctactcaaccaaatgctcccttcccaaacttcatacagaccatccagactactgtggacagaggtttactgttcttcgcagaaaaccaggataacttcatatctctgaacatagaagatggcaatctcatggtgagatacaaactaaattcagagccacccaaagagaagggaattcgagacaccatcaacgatgggaaagatcattcgatcttaatcacaattggaaaactacaaaaacgcatgtggataaatgtgaacgaacgcagtgtacgaatcgaaggggaaatatttgatttcagcacatattatttgggcggaattccaattgcaatcagagaaaggtttaacatctcaacgcctgctttccaaggctgcatgaagaatctgaagaaaaccagtggggttgtcaggttgaatgatactgtgggtgtaaccaagaagtgctcagaagactggaagcttgtgcgaaccgcctcgttctccagaggagggcagatgagctttacaaacttggacgtgccctcgactgaccgcttccagctctcctttgggtttcagacctttcaacccagtggcacactgctcaatcatcagacgcggacaagcagcctgctggtcaccctggaagatgggcacattgagttgagcactagggacagcaacatcccaattttcaagtctccagggacctacatggacggtttactgcatcatgtatctgtaataagtgacacctcaggtctccgccttctcatcgatgaccaggtcctgagaaggaaccagaggcttcctagcttctctaacgcccagcagtcgctccgccttggaggaggtcatttcgagggttgtatcagcaatgttttagtccaaaggttttcacagagtccagaagtcctggatctggccagtaaatctaccaagaaggatgcatccctaggaggctgcagtttaaacaagccaccttttcttatgttgtttaaaagtcccaagagatttaacaagggccggattttcaatgttaatcagctgatgcaagatgcacctcaggccacaaggagcacagaggcttggcaagatgggaggtcctgcctaccacctctgaacaccaaggcctctcacagagccctgcagtttggagacagccccaccagccacttgctactcaagcttccccaggaactgctgaaacctaggtcacagttttctttagacatacagacaacttcccccaaaggactggtgttttacgcaggcaccaaggactccttcctggctctttatgtcgcagatggccgtgttgtctttgctttgggggcaggagggaagaaactgagactcaggagcaaggagagataccatgacgggaagtggcacacggtggtgttcggactaaatggaggaaaggcacgcctggttgtggatgggctaagggcccaggaaggcagtttgcctggaaattctaccatcagccccagagaacaggtttacctagggttgccgctatcaagaaagccaaagagcctaccccagcacagttttgtggggtgcctgagagatttccagttgaactcgaaacccctggattctccttctgcgaggtttggggtatctccctgcttgggtggctctttagagaaaggcatttatttctcccaaggaggaggccatgtgatcctagccaattctgtgtccttggggccagagcttaagctcactttcagcattcgcccacggagtctcactggggtcttaatacacgtcggaagtcaatctggacagcgcttaagtgtgtacatggaggcaggaaaggtcacaacctctgtgagcagtgatgcaggaggaagtgtgacatcaattacaccgaagcagtctctgtgtgatggacagtggcactcggtggcagtctccattaaacagcgcatcctgcatctagaactggatacagacagtagctacacagtcgcaccactttccttctcaccaaacagcacccgagggtcactgcacgtcggaggtgtcccagacaaattgaaaatgcttacactccctgtgtggaactcattttttggctgtctgaagaatattcaagtcaaccatgtccctgtccccatcacagaagccacagaagtccaaggttctgtcagcctgaatggctgccctgaccactaaccctacacagcaagattcacctttggag

SEQ ID NO: 271 - DNA, 592 bp, rat
cagcagccatgagcatttattattttgagtgaaatgcacattgaacttttgtataaaagccatcgaaggtgctgtattggattatttcggtattaatttaactgtccccgcgtcatctgggttctcatctacgtttctgtttccttctgacgtatcattacaatcatctacaattgtccattgttaaaatataaaaaatattagtctattcttcaaaataaagtacctctaatgctgtttgttactgaaagtgaaaattctttaaggggtggtaaagaatcaacttattagaaaaatatatatatatatagcacagaatttcctaagtacatgggaatgccaagcctatgtaggtttttggtggaacgtttctggaacaccacttgccagggttctcatcctgtccattatttgtccatcattccttaagtactttctaaggtgaagcaagtgttatttaatgctgtgcatatcccgtgctccccaaacgtttaacataaaaagaaagctgattcttctgtcttagaaatagcccttaggattaagtttgtcgttaaagaagatgagttattccctacaaagggggaaccgt

SEQ ID NO: 272 - DNA, 5930 bp, rat; identical to SEQ ID NO: 166

SEQ ID NO: 273 - DNA, 2399 bp, rat
gcggcgtggagccaggcagggctcaggctggtggagcgaccggggctggaggctgggagtgaggcgctcacggcctccccgcgccattatccgcgctcgctacgggcgaggccggcgccaggatggcagagatggggagcaagggggtgacggcggggaagatcgcaagcaatgttcagaagaagctgactcgagctcaggagaaggtcctgcagaaactggggaaggcggatgaaacgaaggatgagcagttcgaacagtgcgtccagaatttcaataagcagctgacagagggcacccggctgcagaaggatcttcggacctacctggcttctgttaaagccatgcacgaagcctccaagaagctgagtgagtgtctccaggaggtgtatgagcctgagtggcctggcagggatgaagcgaacaagatagcagagaacaatgacctgctatggatggactatcaccagaagctggtggaccaggctctgctgaccatggatacctacctgggccagttccctgatatcaagtcacgcattgccaagcgggggcggaagctggtggactacgacagcgcccggcaccactatgagtctcttcaaaccgccaaaaagaaggatgaagccaaaattgccaagcctgtctcgctgcttgagaaagccgccccccagtggtgccaaggcaaactacaggctcatcttgtagctcaaactaacctgctccgaaatcaggcagaagaggagctcatcaaagcccagaaggtgttcgaggagatgaatgtggacctgcaggaggagctgccatccctgtggaacagccgtgtgggtttctatgtcaacacgttccagagcatcgcgggtctggaggaaaacttccataaagagatgagtaagctcaatcagaacctcaatgatgtcctggtcagcctagagaagcaacacgggagcaacaccttcacagtcaaggcccagcccagtgacagcgcccctgaaaaagggaacaagagcccttcacctcctccagatggttcccctgctgctacccctgagatcagagtgaaccatgagccagagccggccagtggggcatcgcctggggctaccatccccaagtccccatctcagctccggaaaggcccaccggtccctccgcctcccaaacacaccccatccaaggagatgaagcaggagcagattctcagcctttttgatgacgcatttgtccctgagatcagcgtgaccaccccctcccagtttgaggcccctgggcctttctcagagcaggccagtctactagacctggacttcgagccccttccaccagtggcaagccctgtgaaggcacccacaccctctggtcagtcaatcccatgggacctctgggagcccacagagagtcaagctggcgtcctgccttccggggagcccagttctgctgagggcagctttgctgtggcctggcccagccagacagccgagccagggcctgcccaaccagcagaggcctccgaggtggtgggtggaacccaggagccaggggagacagcagccagtgaagcgacctccagctctctcccggctgtggtggtggagaccttctcagcaactgtgaatggcgccgtggagggcagcactacgactggacgcttggatctgcccccgggattcatgttcaaggtgcaagcccagcatgattacacggccactgacactgacgagctgcaactcaaagctggcgatgtggtactggtgatccccttccagaacccagaggagcaggatgaaggctggctcatgggtgtgaaggagagcgactggaatcagcacaaggaactggagaaatgccgcggcgtcttcccggagaatttcacagagcgggtgcagtgacgggagagcctctgcagccttccggtgtgtgaagaaccttttcccaaaagatgtgtgcttttcttttctttgtttttcttcctcttcttttctgttttttgttttgttttgaaactcttgaaaagtgtcgggaaattggggagcggaaacctaagccaagaggtgtacccccaaagatgaggtggttttccaaaaagccgtccgacccagttcagtggacttctccagtattcccgaagctgctgtgtccccctcctagttgagttcccgatgcccgcatgttcagggcgggccgggggtgcagagccaccgccgcacttgcctgacgcttggccgcgccaccggacagggcttgggtcctcttctggcagctgccctgggcagggcctgcactgtggcccagcctggtccgctctgcagaccaaccgtgtgctgtttgaaaataagccctagtgttcaaaatgcagcgaaacaaacaaaaatgaaaaaccggacaaacccaccaaaaaa

SEQ ID NO: 274 - DNA, 443 bp, rat
tttttttttttttttttaaaatgtagacctttattcactggaaattcagcttgagattcacacacggagcaaaggaagtctggtctttacgacgttatgacaacgtacataatggacattaagtcaacgaacaaaacaaagaggattttcagaagccgtcccagaatctcatcttccaggctctggggtgaggaagtagaaattaatatccagtttctgccgctcatggtcagatattcctgctccctgagagcctcaggaggtggcagctaacacagctttcccagtctccagctcccctctcctgctctagctggaccaaagtgctgggggcacagatgctctcctagcaacctgggttccgttcaggggttcgacggagccaagtccaaagtcacgggaatggtcactcttcctttcaaaaaccctcgtgccgaattctt

SEQ ID NO: 275 - DNA, 426 bp, rat
  misc_feature (390)..(390): n is a, c, g, or t
tttttttttttttttttgtggctgtcacagcacgacctttatttgctggtgctacagggagaggggatgcgggattcacgcaggagacacaggcaggatcagtcatgcctcttcccaacacggggcctctgtctgggccggttgtcacgatcatgctggtcatgccgtcgccgaggagcccaggccttcagcttcccatgctcgaggtccctggagtcccgcctccatggccgatggcctccttcccgcgcctcccagcgctgtcgcagtgattggcggggctccctagtgacctgaggcttctcctccctcctcggcttctcccttcttggcttctccttcttcggtttctcccctttccttggcttctctttctgtggcttctcctgngaacctcggtcaccaaggggtgcgctctcctcccca

SEQ ID NO: 276 - DNA, 504 bp, rat
  misc_feature (452)..(452): n is a, c, g, or t
tttttttttttttttctcttttaaaaaaaactttaatctaaggttattgggattacaaaaataatagcacatttctctaagtgacttgagctcagtaactgagataccagagaggcaaagagatcttctgaggcttgctgcccggatgaatcttacaacatacaaaagtttattttcatatttacagaagaaacatgctcatggcttcttagaattccccttggaattccatagtgactagtgtctgaagctgggagatatttcaaattaaagaaggcattttggaaacagctcacaatgcacctcaagtcacaccaccaaacacttccgagtcctcttctacagatcattctatctcagagcttcgggaacttccaccctccgtagctgtcttatactgctcccccgaatggcttccatgaggttctcatgagctgatctctgtggggtanagggccgggagctttcttccattttcttctcttgcactgacctcagagaatt

SEQ ID NO: 277 - DNA, 474 bp, rat
  misc_feature (375)..(375): n is a, c, g, or t
  misc_feature (457)..(457): n is a, c, g, or t
tttttttttttttttttagaggggagtctgataactttatttctagaccccagagggcgaggacattgcagcagggtgggccctgagttcccaaaagtgcctgggcatgagggttggagaatacagagctggaataagggaccctggcaagagtcagggttgatggtctctgctgcagggcacctcttggctcgtttacttccagcgcccgccgactttgcccttggctgtggcaccggccttcttgctgaacttggccagcatctccactctggcccggacagtcatgatatcgtatttctgacgtttcagcttctccccaaactcaaatttgtcagtctccagttggtacaaggtatcccagagttccttggncttgtccctcagcttatcatcactaagatggtcaatgttcagaggtttgcgcctttcagcaagaatcttctttttcatttcncgggctgtctgtttctt

SEQ ID NO: 278 - DNA, 365 bp, rat
tttttttttttttttttgtcttcaaaataaaaatttattcaatctgtaacaagaacattgaatctgcacatctgcgcacaagttcacatttaaaaacagcggagcacatcagtactaataaaaacaactatgatacaagtgggacatcccaacaccaggattaaggaaggagatgagaccactctttaggttctgcttcaaatgcctcagaaaggtcccagagattccagggagcacctgctgttaataaagtgagagcatagagaagtttgggatagcctggtcgaaggtaacagtcagtgcgagtcctttggacttgtttgggtttcaagcaagtcttacaaagcaaagttcaaaagggggtg

SEQ ID NO: 279 - DNA, 1636 bp, rat
gagctggctttgcatcaccgaagctgggacctgggctgtacagcagaatggcagacatgctgggactgatgcagaggctggaattcgccgtcagccggctcgagcggctgtcctcagggttacacgaacctcccggaggctgtggggaagttaacagcctcagtagaggcatagtagcaccatccgtggaagcctttgacaaactgataaacagtatggtggccgagttcttaaagaacagccgagtccttgctggcgacgtagagactcacgcggaaatggtacatggtgctttccaggcgcagcgtgcttttcttctcatggtctctcagcaccaacaaccccaggagaatgaagttgctgtccttctgaaacccatatcggagaagattcaagaaatacagacattccgcgagagaaaccgggggagcgacatgttcaaccacctctcggcagtcagcgagagcatcgccgccctggggtggatagccgtgtctcccaaacctggtccatatgtcaaggagatgaacgacgccgccaccttttacactaacagggtcctgagggactacaagcacagcgatctgcgccacgtggattgggtgaggtcctatctcaagatctggagcgaactgcaagcctacatcaaggagcaccacaccacaggcctcacttggagtaaaactggtcctgtagcatccacagcatcagcgttttccattctctcctctgggcccggtctccctccaccacctccaccaccacctcctcctggaccacctcccccttttgagaatgagggcggaaaggaggagccctccccgtctcgctcagctttgtttgcccagctaaatcagggagaagccatcacaaaagggctccgacatgtcacggacgacaagaaaatatacaagaatcccagcttgagggcccaaggacaaattcgatctccaaccaaaacccgcacgccgagccctacatcttcaaaatcgaattctcctcagaaacatgctccagtgttggagttggaagggaagaaatggagagtggaataccaagaggacaggaatgaccttgtcatctcagagactgagctaaaacaagtggcgtacattttcaaatgtgacaaatccactcttcagataaagggaaaagtaaactccatcaccgtcgataactgcaagaagtttggcctggtgttcgaccatgtggtgggcatcgtggaagtgatcaactccaaggacattcagatccaggtaatggggagagtgccaacaatctccattaataagacagaaggatgccacctgtacctcagtaaagatgcgctagactgtgagatcgtgagcgccaagtcgtccgagatgaatgtcctggtccctcagggtgacgattatagagaatttcccattcctgagcagttcaagacgatatgggacggatccaagctcatcaccgaacctgcagaaatcatggcctgacctccaagagatatccttccccgagtccctccagctggcagaagcaaacagctaataggagctagatttcaccatagccccggcgtccatgtcagcgtcctgcagttctgtgccgtggaaaacagtttcttttctggcaggcttttatgggcgtt

SEQ ID NO: 280 - DNA, 461 bp, rat
ggggttttatatttattgcaactacaacttttcaaagaacgttagttatttaaattttgttcagacatgcttaaatatatacaaaacgacagtctctaatcccttgaggagaaggcggaacttcagtgttcctcatcggttcaggcacctcgccttgttgcaagcatttccaggcggcctttgagtgtcagttctgcagcactgcttctgcagcgcagcccctgccggctggctcgcggggacaggctatagcccgcggctgtcagcagcacagtcctcgctcgacttttgaacctgggtaaggagatgtccgggccttgttgtgggaattgtctttgacaccattagaaccagacatgatgttggctttaaggtgaaacccacaggatggaaatgggtttctgggtgcggggatggcgcggcagcctgaggaccggacagttacggacgcgagggccacc

SEQ ID NO: 281 - DNA, 561 bp, rat
aaatcctgatactttatttcttatatcctagctatcaaatcccatatgaattttcagcattaaatagtgacacatatcaagtttcagagatttattcatcagtgtaataaactcaaaaaaaaatcaacatgatttcatgcattcggagacatagttcctgcttaagtggaaaattgtgcggatggcttctgaaagaccttcattgtaagcagctttgcagtgaacttcacagtttagaagtctgggccttcttttttcagtttgctgtagtccacgttcacagaatagaacttatattgttcattgggacccagtttgttccaaggctctgggttattcttcctgtcccagctgacatctggattgaacaatgccaagcgcatcacatacagtgctgctccagtaccccctgctccaataaacacgaagagagggatcaagctgggatgtttcttggcttgcccgaggatctggcggagcatgtttgcggcacaggcctacctacaccgagagagaagattaggacacacactaaaccgcttctgcaacctgcctcgtgcc

SEQ ID NO: 282 - DNA, 2744 bp, rat
acaaaatggcgccttacagcctactggtcacccggctgcagaaggccctgggtgtgcggcagtaccatgtggcctctgccctgtgccaacgggccaaggtggccatgagccactttgagcccagtgagtacatccgatatgacctgctagagaagaacattaacattgtccgtaaacggttgaaccggcctcttactctctcggagaagattgtgtatggacacctggatgacccagccaaccaggagatcgagcggggaaagacatacctgcgtttacggcccgaccgggtggccatgcaggatgcaacagcccagatggctatgctacagtttattagcagtgggctgcccaaggtggctgtgccatcaaccatccactgtgatcatctgattgaggcccagcttgggggtgagaaagacctacgccgggccaaggacataaaccaggaagtatataatttcctggcaactgccggtgccaagtatggtgtgggcttctggaggcctggatctggaatcattcaccagatcattctagaaaactatgcataccctggagttcttctgattggcactgactcccacacccccaatgggggtggcctgggaggtatctgcattggagtagggggtgctgatgctgtggatgtcatggctgggatcccctgggagccgaagtgtcccaaggtgattggcgtgaagctgacgggcaccctctctggttggacctcacccaaagatgtgatcctgaaagtggccggcatcctcacagtgaaaggtggcacaggtgccattgtggaataccatggacctggtgtcgactccatctcctgcactggcatggcaacaatttgcaacatgggtgcagaaattggggccactacaccagtgttcccctacaaccacaggatgaaaaagtacctgagcaagacaggccgagcagacattgccaacctagcagaagaattcaaggatcacttagtgcctgaccctggctgccagtatgaccaagtgattgaaattaacctcaatgagctaaagccacatatcaatggaccctttacccctgacttggctcacccagtggcagatgtgggcactgtggcagagaaggaagggtggcctctggacatcagagtaggtttgattggcagctgcaccaattcaagctacgaggacatgggacgatcagcagctgtggccaagcaagccctggcgcacggactcaagtgcaagtctcagttcaccatcaccccaggctctgagcagatccgagccactatcgagcgggatggctatgcacagatcctaagggatgtgggtggaatcgttttggccaatgcctgtggcccttgcatcggccagtgggacaggaaagacatcaagaagggggagaagaatacaatcgtcacctcctacaacaggaacttcacaggccgtaatgatgcaaatcctgagacccatgcctttgtcacatccccagagattgtcacagccctggccattgcgggaacccttaagttcaacccagaaactgacttcttaacaggcaaggatggcaagaagttcaagttggaggctccagatgcagatgagcttccccgatcggactttgatccagggcaggacacataccagcacccccctaaggacagcagtggccagcgggtggatgtgagccctaccagccagcgcctgcagctcctggaaccttttgacaaatgggatggcaaagacctagaggaccagcaaatccttatcaaggtcaaagggaagtgcactactgaccacatttctgctgccggcccctggctcaagttccgtgggcatctggataacatctctaataacctgcttatcggtgccatcaacatcgaaaatggcaaagccaattctgtgcgcaatgctgtcacccaggagtttggccctgtacctgacactgctcgctactacaagaaacatggcatcaggtgggtgatgattggagatgagaactacggtgaaggctcaagccgggagcacgcagcactggagcctcgccatctggggggccgagccatcatcaccaagagcttcgcaaggatccatgaaaccaatctaaagaagcagggcttgctgcccctcacctttgctgacccctctgactacaacaagattcatccagtggacaagctgaccattcaaggcctgaaggactttgcccctggcaagcctctgaactgcatcatcaagcaccccaatgggacccaggagaccatcctgctgaaccacactttcaacgagacacagatcgagtggttccgtgcaggcagcgccctcaacaggatgaaggagctgcagcagtgaggagccaggctggctcactgtcccactctggaccctgctggggcaaaggtgcaggcccatgtgcatccacagagcctcatctggtctgtccagcatgaccacctgctctaagatggtgaccagacctgcttcttgccctccctatcctcagcccactgagtgaaccaacatggagggcacttaagatgatggagggcacttaagatgatgtcccagccccgccttcctgttcagtttggtttgtctttgagcaacccatgcaactgtatttatttttgatgacagcactccctctacagaagtttttattctgcctaatcatttcactggtggctgaaggattttagagaaacttgttcttataaggaaaaaaaaaaaaaaaaaaaaaaaaaaaaa

SEQ ID NO: 283 - DNA, 2744 bp, rat; identical to SEQ ID NO: 282

SEQ ID NO: 284 - DNA, 594 bp, rat
gtcttaactacttgaattttattctcttttgacatgaaattgtggaacactcagataatctataccatgttagtattcctataagagaaaacaggtaaataaagtctgttaggcaatacccatacactttactgcaagaattagtggcatttaaaaagtttctggttcataactcatagttgttaaatgtgcatgacttcagtgttaagacactgtatcttaaaacagtctcttataatacaaactcatttacttagtttactgccggcttcacaggtcagaggaatagacacgttgtgccagagtcagagggtgaataacattctaaatgggagttagtatatgacctaagtaaagtcacaatctgttaatacaaccatggattttttttcacaatgttatcagatccattggaggagtgaagctctgttttccctgtgggcaaagttattaaagttcttcactttcatagagtccggattgagctgccagacgctgaaactctccttcagggttgaaagcttgtttcacatccaaacctttcccatttagggctaaatatttgctgaaagttggtcgaacacgcatttgctt

SEQ ID NO: 285 - DNA, 498 bp, rat
aaacattaaagaattgtataaaatgatacatgacgcagaacaagttctcttacaaatgttcacgtcatttacaactaagatcaagcagccaaaaaggagtagattaataaagccacaggaataaaacagatgcaaatatttaaaaaaaaagatacgtattatgtgttgaataaaataaagtctttccttgtgttggttgggtagtcttttgccttaagaggacaaagctgtgtgtgatcattgggttcagtcttcttccaaaggaataatatcaggaacttcatcagtgtcagatgtcgagtcaaaagcagagaaatcaagcatcagccagttgagaggcgtgttgttaacaaggtaatccataacttcatctaaggactccttcattttctgcagctgccccttgctagaagtgaggacgccatcagacacttccttgaaggaggtaacattgcggaacgccgagttgatgtcacctgccatcacccccaagtgttt

SEQ ID NO: 286 - DNA, 453 bp, rat; identical to SEQ ID NO: 104

SEQ ID NO: 287 - DNA, 516 bp, rat
tttttaatcaagccatctgtgcaaacaatttatttttctttctttcttcaaggttaggaggagagaaaatgaccacatttgggggcctgggagaaaaccagaaaatgctttccgttttcaatcgaatgtcaaggcactggtgtgtgtagaggccgtgcccagccctcagtattcctccggattgcttgactgtaagtctcgcaaatatgaatcgattatgtttggaggcacgccttgcaggaggagcctgcagaaggacagcccacctgttgctgcccctccagggagactggctgtccaggggtatttactccttgatatatcactttcacctccagtttgcattcgatctccactgtcccgaggtcattgactgctttgcagcagtacgtgcctccgtcatagggactaggcttacggatctccagggtacagactccttggttgctgaacattctgtatcttgggtcatccacaatcgccactttgtttttcatccacgtgattttgggcttg

SEQ ID NO: 288 - DNA, 527 bp, rat
  misc_feature (407)..(407): n is a, c, g, or t
tttttttttttttttctatacaagccatttatttgaaatgccaactatatggaggataaagtcagtgttacatgcgtatcagtaacagtagaaaaatagaaccagtgaaaacctctgtacaactgtgatggtacgcaaaagagaaacgtgtcgtttacagtgtttcacacagacggattcaagtttggaggtacctaaataaaaatactatatatttctttaaaaaacactatgtacaattgaagcgtaaacaagttttacaaagtactggttatgcaggttgtaaaaacacttgcataggacatgaaatcagtttaagaaagatttctgagcctttagcattgaaggcacttgactttaccattaacagcacaaccacaagaaacgctcagagacattccttttcnctctacatgtcaaatttgcatcccaaagtgcaagatcaaaagcctagtgtgcgaccgcccatcgcgccacacgtgacatcacaccgaactggcatccactcagcacagcatacaacatcc

SEQ ID NO: 289 - DNA, 686 bp, rat
atacactatttgtttattttaggtcaaaaagtatttaggaaaagttctccatgttcaaaattaaataggaattgtcttctatatacaggaattatattggaaatatgaagtaaaagtttaattctgcagaattaaaacacaattatagtcattcaaaaagtaaaaaaaaatactgaattttttgtgttaaattcttataattttttagtaacaagtgaacttttctaacatttaaaaaagtattcttttatcaatataaaactattcaaataattatgagaatctcttacaccagaaaaattcacatgatacactcgtgaccccaagagttagatcagcagagcgagcggtgtccctgaaacaaagcgcttctccttttgtctcctccatccctacagataagccttatttcacatcatttacatagaactagaccacactctgagagataagtaactctttctttttgcctctggagctcagggacaatcctcagtcttctttcttggcgtgtctcttagcactacttggaggctctgtgccccgcttggacgctgaggaggcagaaccattggaagacggtttgacttcagctttcttttcactcaacgaaaactgctgctgctgccggccaaacagcatccgagtcaaggtgtcctcgaagggcgtgagagtcacagcagcat

SEQ ID NO: 290 - DNA, 3115 bp, rat
ggagggaacacggtgcctcgggttgtgtacacgctccactgacagagcttcttgcagccgggcagccgctgatcacgcgtggccccgccagcccattggctgaggcctcacacacctttgccgctgattggtcgataccacgccccgccttccaccccgcccgcggcgcggggcaggcagagcggctacctgcatggggagggggggcagacagcgcggagcgcggtggcgtcgacgtctagtgtctcagtgctccgtctgtggctaggcagccagcagccaagcagctcgcgacctacggccaggcagccaaccatgcttaacttcggcgcttctctccagcaagcttcggaggggaaaatggaactaatttctgaaaagtccaaagagggagcacatccctgggacaaagctgaacagagtgactttgaagctgtggaagcgctcatgtccatgagctgcgactggaagtctcacttcaagaaataccttgaaaacaggcctgtcacaccagtgtctgatacctcagaggaagacagtttgcttccagggacgcctgaccttcagaccgtcccagcattctgtttgactccaccttacagcccctctgacttcgaaccctcgcaggggtcaaatctgacggcaccagcgccacctactggtcacttcagatcgctctccgatgctgccaagcctcccagcatcgctccttttaaagaggaggaaaagagcccattagctgcccctcccctccctaaggctcaagccaccagtgtcatccgtcacacagctgatgcccaactctgtaaccaccagtcctgccctgtgaaagcagctagcatcctcaactaccaggacaattctttccggagaagaacccacataaatgtcgaggctactcgaaagaacataccctgtgctgctgtgtcaccaaacagacccaagcctgagcccagcacagcggcgaatggcgctgagaaggccggcactgcgccgtatgactttgctgtgccttcctcagagacagtcatctgtaggtcttctcagccagctcccacgtccccagtacagaagtcagtactgatgtcttcacctacagtgtccactgggggagtgccacccttgcctgtcatctgccagatggttccccttccagcaaacaactctctcgttaccacagttgtccccagcagtccgcccagccagccacccgctgtctgctcacccgtgttgttcatgggcactcaggtgcccaagggcacggtcatgtttgtggtaccccagcccgttgtacagagcccaaagcctccagtggtgagccccaatggcaccagactgtctcccattgcccctgcgcctggattctctccttcagcagcaagggttactccccagattgattcgtccagagtaagaagtcacatctgtagccacccaggatgtggcaagacttactttaaaagttcccatctgaaggcccacgtgagaacacacacaggggaaaaacctttcagctgcagctggaaaggctgtgaaaggaggtttgctcgttccgatgaactgtccagacaccggcggacacacacaggtgagaagaaatttgcctgtcccatgtgtgaccgtcggttcatgagaagtgaccatttaaccaaacatgcccggcgacacctatcagccaagaagctgccaaactggcaaatggaagtgagcaagttaaatgacatcgctctgcctccggccacagcgtcggcacagtgacggccagaagatggagactcagaataaactttggtcagagtcgagccggtgaccgtgtcaaatgcttctgcaagtctgcggccctccaacagggcctaaagcagaagcccctggcctggggggaggcccagcctgggttagatgacgagaagtgcttcagccacaggcagttcacagaagggcggggttcatttcttaccacgtagagagatgagaacactcgtgtcccttgagtagttttggaaggtttcggatgagatgagcacagcacaggttttgaatcacatacacatcaggtactttgtttttgccatttatacttgagaccagctttgcagtgtgattcttttaaagcgttggtttcgagaatatagaggctgaaattacggtacagaaatgcagctagaaagtgagtttgtgtcatcttctcctagagttatcttgcttattattcctagtctttacagtcaactccgtggacgtggctaagtatagaaaactatcatttcttccactgttgttggtatttgaggttgaacagctgtacattgctaaggggagcccaaggattggaactctcattaatttaattgcttggaagtgcagctaaagttcttttttttggccttttgttttgaaagtttaggcattttactctaccttagatattagtttgcttgcagttttttgtgtagatttgaaaactgtacaccaatgtgtttcctatagacttaagatacgctgcgctttgtttagaaaacaatctggcagtgaaaatatgtgtcgtaaagaagagatgtcaagaatttgagatgactccttgagaaagatggcttatgtcatcagcaaaggacacttacgtcagacgtacactgtttctatcaaatcaggaagttagtgaccatcacagatggacaggtgtccttttatttataggagtttgtcaggatgtctgagtagataggtaggaaattgttactagaacattcacttccgacttgacaaggatattcatggtgcagatacgttcttcctgccgctgcagtgtctgggtgtccgggaaactccgagactttaaagtgtcataatgtggtcacacctgcagttctggggatccagagccttgcttgtgttctgtaagctctgtcaccgagttgtatccccacctgaaagcagtgacttttgctaacagtatttctgttctgttgtaaagtggatagaagacacacttggtagtaaaggtaaattattcaaagtccacagtgaaaaactcaccataccttcccatttaaaccgtttctgtatctcataggtttctgacatgcaaacttgaacccttgaaaaaaagagttttctt

SEQ ID NO: 291 - DNA, 297 bp, rat
tttttttttttctttttctttccagttttattctactttttttggcctttctccttaatgaacatggggctaatcttgggccttgtggaaggaagaggcctcagagctaatgaggtagctgctgggctccaatagtcatctcctaaggagccctctttgtctgagaaggaaaaacattgattatcataatgagaactgagctggtggctgaggggtggggtgggggcttttgggttctttaagctacactttaatgtagatttccttcctcattgaagcctaacccccctcgtgccg

SEQ ID NO: 292 - DNA, 221 bp, rat
tttttttttttttttttgggagggcaattaacgcagtctttatttacaccacgagagcgacaagtgtgtgatgtggtacaaacactggacccgggaggtggaaagaggtgaccgccagagggcaccgccggtcagtgaaacccaccacacacaaaaaaaaaacgaaacaagaatgagaaaaccaaacatgacccccaaccccgccaggaggagaaagcgcc

SEQ ID NO: 293 - DNA, 300 bp, rat
tttttttttttttttttagggttttgtgttacataacccaacttcttacaccatccctttagctcctgcctgttgagaatctgtttaaaatccaaccagcccactagttaggtcaggtaccaaaatagcatctggcctttttttaggctcagcactgtttcccaaaattaagtttaactgctaaaagaaaggaagaaacttttctcttgtacagcagtttggtcaggattaaataaatggtttggcataagcgtaatgaggttcacgaacttgaggaaagggaattggagacagtgggtt

SEQ ID NO: 294 - DNA, 491 bp, rat
gtttcccgagacagaacaaaataagaataagttttgtacacctacaaggctcggaaagaaaagacaatggaactcagcaaaaagagaagagaggagggtcaccagtactgcaggcagtgacacgctccagcactggccacagtcgacgccaccacctgcgaacacctagccagtagagcagacgtgtcctgctctttagagggtcatgcaaaagaattgtcccccagaaaaaaaatccccaaattatcccagacaggcagctttgtggagataacaaggtgggtgggagaggaaaggagaccccaggatgtcagggtggcaggccacagggcaaaggtaggtccttggctagaggagcacccttccagtccttctcgggatgagggacgggtaggggaagcaggaacagcagcagctttcaagcacaactagcaggaaaggaggcagcctgccttcctaaccaatccctgccaggcgagaggcttggaggc

SEQ ID NO: 295 - DNA, 448 bp, rat
  misc_feature (401)..(401): n is a, c, g, or t
tttttttttttttttttctgtgaaaagacaaaaggaccaaactttatttctctacgcagccttggctggcctggaactcactatgtagaacaggttggccttgagctcacagagatcctcctgttgctgcctttagagtggctacctattggcaacaagcgccctcagcagagcactgatgagtcctcagagctcgtcggacgtgatgttcaccttgggtaggttacattctttactagtttgacagctctgaagaatgtcctggtagtggttcttcagatcctcatacaaggcaacagttttctgcgagtgagctaagggtaacaccttttcattcagcagcatttgtatctggaatttttcttgaggggtctgtgcgtcttcacaatggtaaagcacanatattaggtttgaagcatatggtacgatgtgaccacttcggaactcc

SEQ ID NO: 296 - DNA, 3205 bp, rat
ttactatggcatcggtagtgtcctgacagttcggaaagcaggaaagcaagcgccgagaagaaaggctcgggcccagcggactcttacatcgcaacccatcaaggaattgttattttgggtcctgcaagtggggtccggtccaacttgaggtagcgtgaaggccccttcaggcggcgccgcgggcagccccgcagccggggcctggtgcagccgccgcggccgctgtcagggaagcgcaggcggccaatggaacccgggagcggccgctgctgctgaggcggcggtgtcggcagtccgaccccgaccgcctgcaccccctccgcgagggtcccccggagcttggaagctcgaagtctggctgtagccatgggagacatggtagtggagcctgccaccctgaagccaacttctgagcctactcctagcccatcagggaataacgggggctccctactaagcgtcatcacggagggggtcggggaactgtcagtgattgaccctgaggtggcccagaaggcctgccaggaggtactggagaaagtcaagcttttgcatggaggtgtagccatctctagcaaaggcagcccactggagttggttaatggggatggtgtggacaatgagatccgttgcctagatgatccacctaccgagatcagggaggaagaagatgagatggagcctggtgtggtctctggcacagccaaaggaacaagaagaagacgacagaacaactcagccaaacagtcttggctcctgaggctgtttgaatcaaaactatttgacatctctatggccatttcatacttgtataactccaaggagccgggagtgcaagcctacattggcaaccggctcttctgctttcgcaatgaggatgtggacttctatttgccccagttgcttaacatgtatatccatatggatgaggatgtgggtgatgccattaaaccctacatagtccaccgttgtcgccagagcatcaacttttccctccagtgtgccctgttgcttggggcctactcttcagacatgcacatttccactcaacgacactcccgagggaccaagttacggaagctaatcctctcagatgagctgaagccagctcaccgaaagagggagctgccaactttaagcccagcccctgacacaggactgtctccctctaaaaggactcaccagcgctctaagtcagatgccacggccagcataagtctcagcagcaacctgaaacgaacagccagcaaccctaaagtggagaatgaggatgaggagctctcctccagcaccgagagtattgataattcattcagttcccctgtccggctggcccctgagcgagaattcatcaagtccttgatggcaatcggcaaacggctggccacgctccccactaaagagcaaaaaacacaaaggctgatctcagaactttccctgctcaaccataagctccctgcccgagtctggctgcccacagctggctttgaccaccacgtggtccgtgtgccccacacacaagctgttgtcctcaattccaaggataaggctccctacctgatctatgtggaagttcttgaatgtgaaaacttcgacacaactaatgttcctgcccggattcctgaaaaccgaattcggagtacgaggtctgtggagaacctgccggaatgtggtatcactcacgagcagcgggctggcagcttcagcactgtgcccaattatgacaatgacgatgaagcctggtcggtggatgacataggcgagctgcaggtggagctcccagaagtgcacaccaacagctgtgacaacatctctcagttctcggtggacagcatcaccagccaggagagcaaggagcctgtgttcattgcggcaggggacatcagacggcgcctttcagaacagctggctcacactcccacagccttcaaacgagaccctgaagacccttctgcagtcgccctcaaagagccctggcaggagaaagtgcggaggatcagagaaggttccccgtatggccatcttcccaattggcgactcctttcagtcattgtcaagtgtggagatgaccttcgccaggagctgctggctttccaggtgttgaaacaactgcagtccatttgggaacaggagcgagtgcctctttggatcaagccatataagattcttgtgatttcagctgacagtggcatgattgaaccagtagtcaacgctgtgtccatccaccaggtgaagaaacagtcacagctctccttgctcgattacttcctgcaggagcatggcagttacaccactgaggcattcctcagtgcccagcgcaattttgtgcaaagttgtgctggctactgcttggtctgctacctattacaagtcaaggacaggcacaatgggaacatccttctggacgcagaaggtcacatcatccacatcgactttggcttcatcctttccagctcaccccgaaacctgggcttcgagacgtcagcctttaagctgaccacagaatttgtggatgtaatgggcggcctgaacggtgatatgttcaactactataagatgctcatgctgcaagggctgatcgctgctcgcaaacacatggacaaggtggtacagattgtggagatcatgcagcaaggttctcagcttccttgcttccatggctccagcaccattcgcaacctcaaagagaggttccacatgagcatgactgaggagcagctgcagctgctggtggagcagatggtggacggcagcatgaggtccatcaccaccaaactctacgatggcttccagtacctcaccaatggcatcatgtgacaccactttcaggcccagaagtggtgggattgaaggcaccctccttaggaggacccttgcctaagaaaacctaaatcacaaaatcccacctacctaaccacctacccaagggaaatggaaggcaaaaaacacaaaggatcatgtggtaaccatgagagctggccaaagggtaggagagccaaccatggggtccagacttgctggggcttccccacctcttgctgtgtcagtattgccacctgacagatcccaggactcactgccctccagagaacagagatgatgaacatgaggaggactggaaccttcttcccctcggggatctcatcttttactatccctgggtcccagcaagatgggaggagtgggttcttggtacttaggactt

SEQ ID NO: 297 - DNA, 402 bp, rat
atgtcgcaagggccccccgcgggcggcgtgctgcagagcagcgtggcggcgcctgggaaccagccgcagagccccaaggatgatgacaggaaggttcgaagaagagagaaaaaccgggttgcagctcagaggagccgaaagaagcagacacagaagtctgacaagcttcacgaggaacatgagagtctggagcaggagaactctgtgctgcgcagggagatcgcgaagctgaaggaggagctgcggcacctgactgaggcgctgaaggagcacgagaagatgtgcccgctgctgctctgcccgatgaactttgtgcagcttcggccagaccccgtggccagctggtctgcccatgatgccccagatcacccctcttttatctggctcggaaccttggtttga

SEQ ID NO: 298 - DNA, 452 bp, rat
ctcagtatttaaacaattagtttttacttagtgtaactttactgttcaaaaatcatacttactggggttggggatttagctcaatggtagagcgcttacctaggaagcgcaaggccctgggttcggtccccagctcccaaaaaaagaaccaaaaaaaaaaaattttacttactaaagccacaacctagtccagaaggacagaacttttatagcaaaactttgatacacaattatcagagatgcaaatactaaatggatacagaagctattcagaggctgacaatgacttccagcaaggcattcataggcacagtctagatgctcccatcggttccgaaagctcagcgctaggcttcgctccacatggccccaaagcttcagagttctcggccgtgtgcagagaagagacatggagagcattgttgctcacctgggagagagtgtgctgtcaa

SEQ ID NO: 299 - DNA, 5930 bp, rat; identical to SEQ ID NO: 166

SEQ ID NO: 300 - DNA, 315 bp, rat
tttccagtgggtttttattagtagttgcatcatgattcagggtcccagggtagggaccatcatatactgagggcccccttttctaacggggagaagggcaaagagcagaggaaaggtgggcggagccaggtcagatcttcccaggaaatgtgccttcggctatgcgggcatcccaggctgagacccatgagacggggcaaagggacttgtacactcgccgggaccactcccaccctcgtgccgaattcttggcctcgagggccaaattccctatagggagtcgtattaaattcggaatcatgtcaaagctgtttc

SEQ ID NO: 301 - DNA, 687 bp, rat
gattcactcgcaccagatttattggctgatcactcacacagagctttgattgacaccaaggggatgaaacccaggagcttccagcctcaggacctacctccaggaaaagttgtgaggagcgttttctcaacaaatgggcaacactgggtactccaactagatctgagcctcacagaagcctgagaccagcagtaccccatgctcacctctctcagaggtcctggagactttggtgaccatggcccttgccctgtacaaggctcgctcctcctccaagccgcacaacactgtacagggagcatgtgtggatctgtgtgtttgttgaatgactgagtgaactatgctgatcagatacgagggacacctgatacacccagggcccaattgtgagcactcaaggctattggctcttggaccctctgcccggcacacacacttcttttgcctgtgggcagctgggaactcaacaacacaccccactcccaacacccgttaacagacagccctagatgtgtctactcagctgagtatctagtgaggtgacctgggttccaacacaaatggcctgacatacaaagcagtctgccactgcccttcatgccagctccagtctccttattagcacttgtaaactgtttgacattgtaaagaccttctgcggacaggaggacctgggggcttggtgct

SEQ ID NO: 302 - DNA, 476 bp, rat
ccctttgagaactaaaattgaatgttaggggggggagggggacacacacagttacttgtgttttgaaattaaaagttgaagggaacaattgggatttaaaattttctactttctaaattgaaacttaactttgggaataaaataaccacaggtaaaagtcattgatcctttcaaacaatttttacagcaacaacatagggagaggaggcgtgaagtgttttaatgtgtgcttgctggatgccatgtcctgtcataagtgcgttacccaatcagctcactggaacctcgcaaccctgtgacgtgagttcatagccgtgcttgacagaccaggctcagaggctatgtaaacctggcgatgtcctgcaacccataaaacatggagtcaggcccagtgcctttaaaccctcctcctgaaaggaaggcttatgaagctgagtttctccatgtcatgtccatccccaatcttgtcccagatc

SEQ ID NO: 303 - DNA, 572 bp, rat
cttaaaccagaatttaatggggggggggggggggaacgccacaaaatgaaatgtgtgtaaccgcaattggatgaccacagtgacgaggcactcaaatggcttcgccgctaagaagaccgacggcagcttttatgtgtagagctctcggcggcctgcctggcttcccgttcacaagtcatctgactctggcatagtgacatcttctgcaggctcagttgtgatcacgacaggaatattctcagatatccacccctttggtgtcctattaaagcatcgtctgcccgaaagaggattggcaaaggccaaaaacctgggatctgttagcagcagtcgttcgaagtctggaaccttgaatttaaccatttttgatgctttctcaaaacctccaaatggagtggcaactctgttaaagctcctgtaatctggcagttctgcctttccttcaggcttgaaaagtttcgggtacaaagcttccaggagctctggatcgtcgccaatggcctgctcccagggagactggtagtacttaggaacagccgtcgtgttaaatctttcaggaggaatttccttca

SEQ ID NO: 304 - DNA, 306 bp, rat
tgctctttggggaaggagggcatggttctagttttgttttttgtcttgtttttgcttccttctgacaattgtcttgggccttggcgatagaagtaaagacaccagtttaacataaccctggggcactggggagaaggaagggcaggctctcacagactgaaaaattgcaagttgctcacagcgcagtcatgttttcaaaaagtatcaagctgatgaaaataccgtgattatctctattcaatgattgcgatacttgtaaaatgcgactataaatccagatatgattatcatgtaattccataaaaa

SEQ ID NO: 305 - DNA, 538 bp, rat
gccttgaccctcttattaccaacatgtgcattttctataaagctatgaaatatgtgatattcatatttcaatatgtgatattttaatactaaatatggcaactagttatagataactatgttatctatctttatccctcacacagaaccaacctaacaactaaaccacagaactaatcttttgcttataagattcaaaagtcttcatagctccatcctaaaaggtgaaatcaaagggtagctctgtaactcctagttcagttcaatgccacatgaatctattgggtaaacttcgtgttgctctactattgtgatgctgggggtatcagacagaacaccttcttcaccccaggcctactcacacaagaaagaagacgggcttttgtaggttgcaagtcctggtctggtttatttataaagcaataaatatttgaagcacaaacaaactgcacgtgtgtaaacaaactgtacaatgactgatgggagatgggagagggcctcagaggattccaagcacaatactgtcgtcctgagtgtaa

SEQ ID NO: 306 - DNA, 515 bp, rat
caacattaaaatagatttattaattactggtgaaaaacatgatatattataaccaagtcatatactttattgaaaagaaaaaaatattcggtaagaagtttggcacggtcttctgctgggacctgtgtgaaatcccaggacttgtaggtcggggctgccttcgtgaggggtgtcaatgcagcccaagaagtgggtaaagtaggaagtgggggtcaaagaaaggcaatcaagaggtctgctcacaggggccttttcccacgttcatgcactgtcaggctgtatcctgggacagcggggagcctcggagagttaatgagaaacagaattgtcactttggcgaccaatgtcagaaaacaggttcctggtcaagcgttaggtactagcgaattctgaccctgagacttgaggtgtcactgtctttaaactgccaggcatggagggaagtgtccaaagatgggacttatagagagaagtggtcccggcttcctgtagtctccatctcaccagccccaggc

SEQ ID NO: 307 - DNA, 589 bp, rat
caaaatccacagaatttattttaaataagtgaatttaaaaacccaagggagtcacatatacagataaaggcgacatcatccctgacacatttccacctctgccctttcccccacacttcagcttcattctgaactatgtgctaatgagtttgtattctttcttgaaaaggtgtgtctgtgtttactcagccttccaaatcaggcaaactataaacttacagactgtaaggccctgaggacacagtggcttgtacttcctttgttaaaccatctttctcacccttcagggctccaaagtctagtgcttgacctcacacttacgaaaccctcagacagaagctttccatgagtttcaagtaaggcaagtgcctttataggacaagacaaagagaaaggaacccaccatctgaatgtgcaaggggcatgcatccctgtcaataaaaagggtggaggatgaacctgctacccacagagtttaagaagatgttctgataaacctctggggtataacctgagagccccacactgcaacctgctgaacatgggatgaggaatgtgcttctgttaaaggccaagagaacactgttgg

SEQ ID NO: 308 - DNA, 573 bp, rat
  misc_feature (389)..(389): n is a, c, g, or t
cacggacaagaagatgaagggccttgagtgtctggtaccagacccaacagcagtggtatccctctgtatgtgctcttgaggtggggatttatagagtgcagatcaaactttggaaagattgcattccctagaagtaaggcagagcagaagccgagcgtttgccatgtgtttgagacagagcacaccctgttgtctgctgccttgagcagtgtgaatgctgtcttaagggctttctgtagagccgccttccattgaatctctctgggcttcacagccctgcatggcctatgctgtgactgtgcaccccaggtcgaggattgtgaggcgtggcttcagtcttgtccctgtcctccctgaaagttccctctcaagtggaggtcagaggctangagaactcctgtcagaatgactgtggtgactgggtaataaattttattgctgtttccttcacaggacagatcacagtgagattctctttcatacaccttctcctagccctggtggggccaggactgcattgaccctggacatcaaagggaagattatgtggctgctaaggccatcagcccacag

SEQ ID NO: 309 - protein, 606 aa, rat
MDSQRELAEELRLYQSTLLQDGLKDLLEEKKFIDCTLKAGDKSFPCHRLILSACSPYFREYFLSEIEEEKKKEMALDNVDPAILDLIIKYLYSASIDLNDGNVQDIFALSSRFQIPSVFTVCVSYLQKRLAPGNCLAILRLGLLLDCPRLAISAREFVSDRFVQICKEEDFMQLSPQELISVISNDSLNVEKEEVVFEAVMKWVRTDKENRAKNLSEVFDCIRFRLMAEKYFKDHVEKDDIIKSNPEVQKKIKVLKDAFAGKLPEPSKSAEKGGTGEVNGDVGDEDLLPGYLNDIPRHGMFVKDLILLVNDTAAVAYDPMENECYLTALAEQIPRNHSSIVTQQNQVYVVGGLYVDEENKDQPLQSYFFQLDNVSSEWVGLPPLPSARCLFGLGEVDDKIYVVAGKDLQTEASLDSVLCYDPVAAKWSEVKNLPIKVYGHNVISHNGMIYCLGGKTDDKKCTNRVFIYNPKKGDWKDLAPMKTPRSMFGVAIHKGKIVIAGGVTEDGLSASVEAFDLKTNKWEVMTEFPQERSSISLVSLAGSLYAIGGFAMIQLESKEFAPTEVNDIWKYEDDKKEWAGMLKEIRYASGASCLATRLNLFKLSKL

SEQ ID NO: 310 - protein, 154 aa, rat
MGLSDGEWQMVLNIWGKVEGDLAGHGQEVLISLFKAHPETLEKFDKFKNLKSEEEMKSSEDLKKHGCTVLTALGTILKKKGQHAAEIQPLAQSHATKHKIPVKYLEFISEVIIQVLKKRYSGDFGADAQGAMSKALELFRNDIAAKYKELGFQG

SEQ ID NO: 311 - protein, 1935 aa, rat
MADREMAAFGAGAPFLRKSEKERLEAQTRPFDLKKDVFVPDDKEEFVKAKIVSREGGKVTAETENGKTVTVKEDQVMQQNPPKFDKIEDMAMLTFLHEPAVLYNLKERYASWMIYTYSGLFCVTVNPYKWLPVYNAQVVAAYRGKKRSEAPPHIFSISDNAYQYMLTDRENQSILITGESGAGKTVNTKRVIQYFAVIAAIGDRSKKDQTPGKGTLEDQIIQANPALEAFGNAKTVRNDNSSRFGKFIRIHFGATGKLASADIETYLLEKSRVIFQLKAERDYHIFYQILSNKKPELLDMLLITNNPYDYAFFSQGETTVASIDDSEEHMATDSAFDVLGFTPEEKNSIYKLTGAIMHFGNMKFKQKQREEQAEPDGTEEADKSAYLMGLNSADLLKGLCHPRVKVGNEYVTKGQNVQQVAYAIGALAKSVYEKMFNWMVTRINATLETKQPRQYFIGVLDIAGFEIFDFNSFEQLCINFTNEKLQQFFNHHMFVLEQEEYKKEGIEWTFIDFGMDLQACIDLIEKPMGIMSILEEECMFPKATDMTFKAKLYDNHLGKSNNFQKPRNIKGKQEAHFSLIHYAGTVDYNILGWLQKNKDPLNETVVGLYQKSSLKLLSNLFANYAGADAPVDKGKGKAKKGSSFQTVSALHRENLNKLMTNLRSTHPHFVRCIIPNETKSPGVMDNPLVMHQLRCNGVLEGIRICRKGFPNRILYGDFRQRYRILNPAAIPEGQFIDSRKGAEKLLGSLDIDHNQYKFGHTKVFFKAGLLGLLEEMRDERLSRIITRIQAQSRGVLSRMEFKKLLERRDSLLIIQWNIRAFMGVKNWPWMKLYFKIKPLLKSAETEKEMANMKEEFGRVKDALEKSEARRKELEEKMVSLLQEKNDLQLQVQAEQDNLADAEERCDQLIKNKIQLEAKVKEMTERLEDEEEMNAELTAKKRKLEDECSELKRDIDDLELTLAKVEKEKHATENKVKNLTEEMAGLDEIIVKLTKEKKALQEAHQQALDDLQAEEDKVNTLTKAKVKLEQQVDDLEGSLDQDKKVRMDLERAKRKLEGDLKLTQESIMDLENDKQQLDERLKKKDFELNALNARIEDEQALGSQLQKKLKELQARIEELEEELEAERTARAKVEKLRSDLSRELEEISERLEEAGGATSVQIEMNKKREAEFQKMRRDLEEATLQHEATAAALRKKHADSVAELGEQIDNLQRVKQKLEKEKSEFKLELDDVTSNMEQIIKAKANLEKMCRTLEDQMNEHRSKAEETQRSVNDLTRQRAKLQTENGELSRQLDEKEALISQLTRGKLTYTQQLEDLKRQLEEEVKAKNALAHALQSARHDCDLLREQYEEETEAKAELQRVLSKANSEVAQWRTKYETDAIQRTEELEEAKKKLAQRLQDAEEAVEAVNAKCSSLEKTKHRLQNEIEDLMVDVERSNAAAAALDKKQRNFDKILVEWKQKYEESQSELESSQKEARSLSTELFKLKNAYEESLEHLETFKRENKNLQEEISDLTEQLGSTGKSIHELEKIRKQLEAEKLELQSALEEAEASLEHEEGKILRAQLEFNQIKAEIERKLAEKDEEMEQAKRNHLRVVDSLQTSLDAETRSRNEALRVKKKMEGDLNEMEIQLSHANRMAAEAQKQVKSLQSLLKDTQIQLDDAVRANDDLKENIAIVERRNNLLQAELEELRAVVEQTERSRKLAEQELIETSERVQLLHSQNTSLINQKKKMDADLSQLQTEVEEAVQECRNAEEKAKKAITDAAMMAEELKKEQDTSAHLERMKNNMEQTIKDLQHRLDEAEQIALKGGKKQLQKLEARVRELENELEAEQKRNAESVKGMRKSERRIKELTYQTEEDRKNLLRLQDLVDKLQLKVKAYKRQAEEAEEQANTNLSKFRKVQHELDEAEERADIAESQVNKLRAKSRDIGAKGLNEE

SEQ ID NO: 312 - protein, 375 aa, rat
MAPGETVREAGPAKSALQKVRRATLVINLARGWQQWANENSTRQAQEPAGWLPGATQDLPHTPKEPGPRQHAPKPPSPKPDGDREGRGSEEATEVSHIKRKEVTRTVVSKAYERGGDVNYLSHRYEHDGGVSEAVQPDNDIDRILLSHDSPTRRRKCTNLVSKLTKGWKVMEQEEPKWKSDSIDTEDSGYGGDMEERPEQDVAQVAAARIKRPLHSQANRYSETLNCKAHRKYSQVDNLKGRWQQWADEHIQSQKLNPFSDEFDYDLAMSTRLHKGDEGYGRPKEGSKTAERAKRAEEHIYREIMELCFVIRTMARHRRDGKIQVTFGELFDRYVRISDKVVGILMRARKHGLVHFEGEMLWQGKDDHVVITLLE

SEQ ID NO: 313 - protein, 1146 aa, rat
VPTTAKLKIDEFESNVNEVKDPYPSADFPGDDEEDEPEIPASPRPRPLAELQLKEKAVPIPEASSFFIFSPTNKIRVLCHRIVNATWFTNFILLFILLSSAALAAEDPIRADSMRNQILEYFDYVFTAVFTVEIVLKMTTYGAFLHKGSFCRNYFNILDLLVVAVSLISMGLESSAISVVKILRVLRVLRPLRAINRAKGLKHVVQCVFVAIRTIGNIVLVTTLLQFMFACIGVQLFKGKFYSCNDLSKMTEEECRGYYYIYKDGDPTQIELRPRQWIHNDFHFDNVLSAMMSLFTVSTFEGWPQLLYKAIDSNEEDTGPVYNNRVEMAIFFIIYIILIAFFMMNIFVGFVIVTFQEQGETEYKNCELDKNQRQCVQYALKARPLRCYIPKNPYQYQVWYVVTSSYFEYLMFALIMLNTICLGMQHYNQSEQMNHISDILNVAFTIIFTLEMILKLIAFKPRGYFGDPWNVFDFLIVIGSIIDVILSEIDTLLASSGGLYCLGGGCGNVDPDESARISSAFFRLFRVMRLIKLLSRAEGVRTLLWTFIKSFQALPYVALLIVMLFFIYAVIGMQMFGKIAMVDGTQINRNNNFQTFPQAVLLLFRCATGEAWQEILLACSYGKRCDPESDYAPGEEYACGTNFAYYYFISFYMLCAFLIINLFVAVIMDNFDYLTRDWSILGPHHLDEFKAIWAEYDPEAKGRIKHLDVVTLLRRIQPPLGFGKFCPHRVACKRLVGMNMPLNSDGTVTFNATLFALVRTALKIKTEGNFEQANEELRAIIKKIWKRTSMKLLDQVIPPIGDDEVTVGKFYATFLIQEHFRKFMKRQEEYYGYRPKKDTVQIQAGLRTIEEEAAPEIHRAISGDLTAEEELERAMVEAAMEEGIFRRTGGLFGQVDNFLERTNSLPPVMANQRPLQFAEMEMEELESPVFLEDFPQNPGTHPLARANTNNANANVAYGNSSHRNSPVFSSIRYERELLEEAGRPVTREGPFSQPCSVSGVNSRSHVDKLERQMSQRRMPKGQVPPSPCQLSQEKHPVHEEGKGPRSWSTETSDSESFEERVPRNSAHKCTAPATTMLIQEALVRGGLDSLAADANFVMATGQALADACQMEPEEVEVAATELLKRESPKGGPCPGSLEPKVLPWAA

SEQ ID NO: 314 - protein, 287 aa, rat
MELYETSPYFYQEPHFYDGENYLPVHLQGFEPPGYERTELSLSPEARGPLEEKGLGTPEHCPGQCLPWACKVCKRKSVSVDRRRAATLREKRRLKKVNEAFEALKRSTLLNPNQRLPKVEILRSAIQYIERLQALLSSLNQEERDLRYRGGGGPSRWYPVNATPTAPPAVRSGAMHWSLVPTQEIICSQLTLQVPTTCTPLRPSWTASRWRICLSPSQMKPCPTEIVCQAGCAWEPLSWCQTPPLLQQGPFKWGCPGAQKTALGCHKPDYPPSIHIRLTPSPAREFN

SEQ ID NO: 315 - protein, 747 aa, rat
MPLFKLTGQGKQIDDAMRSFAEKVFASEVKDEGGRHEISPFDVDEICPISLREMQAHIFHMENLSMSMDGRRKRRFQGRKTVNLSIPQSETSSTKLSHIEEFISSSPTYESVPDFQRVQITGDYASGVTVEDFEVVCKGLYRALCIREKYMQKSFQRFPKTPSKYLRNIDGEALVAIESFYPVFTPPPKKGEDPFRREDLPANLGYHLKMKGGVIYIYPDEAAASRDEPKPYPYPNLDDFLDDMNFLLALIAQGPVKTYTHRRLKFLSSKFQVHQMLNEMDELKELKNNPHRDFYNCRKVDTHIHAAACMNQKHLLRFIKKSYHIDADRVVYSTKEKNLTLKELFAQLNMHPYDLTVDSLDVHAGRQTFQRFDKFNDKYNPVGASELRDLYLKTDNYINGEYFATIIKEVGADLVDAKYQHAEPRLSIYGRSPDEWSKLSSWFVGNRIYCPNMTWMIQVPRIYDVFRSKNFLPHFGKMLENIFLPVFEATINPQTHPDLSVFLKHITGFDSVDDESKHSGHMFSSKSPKPEEWTMENNPSYTYYAYYMYANIMVLNCLRKERGMNTFLFRPHCGEAGALTHLMTAFMIADNISHGLNLKKSPVLQYLFFLAQIPIAMSPLSNNSLFLEYAKNPFLDFLQKGLMISLSTDDPMQFHFTKEPLMEEYAIAAQVFKLSTCDMCEVARNSVLQCGISHEEKAKFLGNNYLEEGPVGNDIRRTNVAQIRMAYRYETWCYELNLIAEGLKSTE

SEQ ID NO: 316 - protein, 166 aa, rat
MSPKKAKKRLEGGSSNVFSMFEQTQIQEFKEAFTIMDQNRDGFIDKNDLRDTFAALGRVNVKNEEIDEMIKEAPGPINFTVFLTMFGEKLKGADPEETILNAFKVFDPEGKGSLKADYVREMLTTQAERFSKEEIDQMFAAFPPDVTGNLDYKNLVHIITHGEEKD

SEQ ID NO: 317 - protein, 606 aa, rat; identical to SEQ ID NO: 309

SEQ ID NO: 318 - protein, 146 aa, rat
VHLTDAEKAAVNGLWGKVNPDDVGGEALGRLLVVYPWTQRYFDSFGDLSSASAIMGNPKVKAHGKKVINAFNDGLKHLDNLKGTFAHLSELHCDKLHVDPENFRLLGNMIVIVLGHHLGKEFTPCAQAAFQKVVAGVASALAHKYH

SEQ ID NO: 319 - protein, 1146 aa, rat; identical to SEQ ID NO: 313

SEQ ID NO: 320 - protein, 182 aa, rat
KAKKAITDAAMMAEELKKEQDTSAHLERMKKNLEQTVKDLQHRLDEAEQLALKGGKKQIQKLEARVRELEGEVENEQKRNVEAIKGLRKHERRVKELTYQTEEDRKNVLRLQDLVDKLQSKVKAYKRQAEEAEEESNVNLAKFRKIQHELEEAEERADIAESQVNKLRVKSREVHTKIISEE

SEQ ID NO: 321 - protein, 242 aa, rat
MMMDLFETGSYFFYLDGENVTLQPLEVAEGSPLYPGSDGTLSPCQDQMPQEAGSDSSGEEHVLAPPGLQPPHCPGQCLIWACKTCKRKSAPTDRRKAATLRERRRLKKINEAFEALKRRTVANPNQRLPKVEILRSAINYIERLQDLLHRLDQQEKMQELGVDPYSYKPKQEILEGADFLRTCSPQWPSVSDHSRGLVITAKEGGASVDASASSSLQRLSSIVDSISSEERKLPSVEEVVEK

SEQ ID NO: 322 - protein, 484 aa, rat
MTGKATPEASVSTSEGTAPEPAKVPTPEPSGQVAASESTGQEQAPEPQKQPQAQDPAAHEAPATPATTKPEAPSEDVPSAPLQLTLEDVSHSSLTVSWEPPEDLGSWGSRAMCWSSVREGASEWVPVNPRPVMVTQQTVRNLALGDKFFLRVTAVNSAGAGPPAVLDQPVHIQEITEAPKIRVPRHLRQTYIRQVGESVNLQIPFQGKPKPQASWTHNGHALDSQRVNVRSGDQDSILFIRSAQRSDSGRYELTVRLEGLEAKAAIDILVIEKPGPPSSIKLLDVWGCNAALEWMPPQDTGNTELLGYTVQKADKKTGQWFTVLERYHPTTCTVSDLIIGNSYSFRVFSENLCGLSDLATTTKELAHIHKAAITAKPREFTERDFSEPPSFTQPVADRTSTPGYSTQLFCSVRASPKPKIIWMKNKMSIQGDPKYRAVSEQGVCTLEIRKPSPFDSGVYTCKAINVLGEPAVDCRLEVKASATH

SEQ ID NO: 323 - protein, 457 aa, rat
MELTAVLLLLGLCSAGTVLGSEHETRLVAKLFKDYSSVVRPVGDHREIVQVTVGLQLIQLINVDEVNQIVTTNVRLKQQWVDYNLKWNPDDYGGVKKIHIPSEKIWRPDVVLYNNADGDFAIVKFTKVLLDYTGHITWTPPAIFKSYCEIIVTHFPFDEQNCSMKLGTWTYDGSVVAINPESDQPDLSNFMESGEWVIKEARGWKHWVFYSCCPNTPYLDITYHFVMQRLPLYFIVNVIIPCLLFSFLTSLVFYLPTDSGEKMTLSISVLLSLTVFLLVIVELIPSTSSAVPLIGKYMLFTMVFVIASIIITVIVINTHHRSPSTHIMPEWVRKVFIDTIPNIMFFSTMKRPSRDKQEKRIFTEDIDISDISGKPGPPPMGFHSPLIKHPEVKSAIEGVKYIAETMKSDQESNNASEEWKYVAMVMDHILLGVFMLVCLIGTLAVFAGRLIELHQQG

SEQ ID NO: 324 - protein, 377 aa, rat
MCEEEDSTALVCDNGSGLCKAGFAGDDAPRAVFPSIVGRPRHQGVMVGMGQKDSYVGDEAQSKRGILTLKYPIEHGIITNWDDMEKIWHHSFYNELRVAPEEHPTLLTEAPLNPKANREKMTQIMFETFNVPAMYVAIQAVLSLYASGRTTGIVLDSGDGVTHNVPIYEGYALPHAIMRLDLAGRDLTDYLMKILTERGYSFVTTAEREIVRDIKEKLCYVALDFENEMATAASSSSLEKSYELPDGQVITIGNERFRCPETLFQPSFIGMESAGIHETTYNSIMKCDIDIRKDLYANNVLSGGTTMYPGIADRMQKEITALAPSTMKIKIIAPPERKYSVWIGGSILASLSTFQQMWISKQEYDEAGPSIVHRKCF

SEQ ID NO: 325 - protein, 259 aa, rat
AKEWGYASHNGPEHWHELYPIAKGDNQSPIELHTKDIRHDPSLQPWSVSYDPGSAKTILNNGKTCRVVFDDTFDRSMLRGGPLSGPYRLRQFHLHWGSSDDHGSEHTVDGVKYAAELHLVHWNPKYNTFGEALKQPDGIAVVGIFLKIGREKGEFQILLDALDKIKTKGKEAPFNHFDPSCLFPACRDYWTYHGSFTTPPCEECIVWLLLKEPMTVSSDQMAKLRSLFASAENEPPVPLVGNWRPPQPIKGRVVRASFK

SEQ ID NO: 326 - protein, 359 aa, rat
MSYRRELEKYRDLDEDEILGALTEEELRTLENELDELDPDNALLPAGLRQKDQTTKAPTGPFKREELLDHLEKQAKEFKDREDLVPYTGEKRGKIWVPKQKPMDPVLESVTLEPELEEALANASDAELCDIAAILGMHTLMSNQQYYQALGSSSIVNKEGLNSVIKPTQYKPVPDEEPNPTDVEETLERIKNNDPELEEVNLNNIRNIPIPTLKAYAESLKENSYVKKFSIVGTRSNDPVAFALAEMLKVNKVLKTLNVESNFISGAGILCLVEALPHNTSLVELKIDNQSQPLGNKVEMEIVNMLEKNTTLLKFGYHFTQQGPRLRASNAMMNNNDLVRKRRLADLTGPIIPKCRSGV

SEQ ID NO: 327 - protein, 158 aa, rat
MGSSKSRSILGWGQTGQDGGHRTQMGPQPPPHPTHRNSFRSRFKSGSGRASEALPELRWPENGKEGQCRVSTGRERGLQVSDSRGILQQGGCSGSSLQTHHSHEALRPRDWCGKGPQWTWCTVCPNRSVPGSGMTDRTFPGESRAQDEARQGEAGGAE

SEQ ID NO: 328 - protein, 324 aa, rat
MNCMKGPLPLEHRAAGTKLSAASSPFCHHTQALAMASVLAPGQPRSLDASKHRLEVHTISDTSSPEVAEKDKGQQGKNEDVGAEDPSKKKRQRRQRTHFTSQQLQELEATFQRNRYPDMSTREEIAVWTNLTEARVRVWFKNRRAKWRKRERNQQAELCKNGFGPQFNGLMQPYDDMYPGYSYNNWAAKGLTSASLSTKSFPFFNSMNVNPLSSQSMFSPPNSISSMSMSSSMVPSAVTGVPGSSLNSLNNLNNLSSPSLNSAVPTPACPYAPPTPPYVYRDTCNSSLASLRLKAKQHSSFGYASVQNPASNLSACQYAVDRPV

SEQ ID NO: 329 - protein, 1935 aa, rat; identical to SEQ ID NO: 311

SEQ ID NO: 330 - protein, 199 aa, rat
APKKPEPKKDDAKTAAPKAAPAPAAAPAAAPEPERPKEAEFDASKIKIEFTPEQIEEFKEAFQLFDRTPKGEMKITYGQCGDVLRALGQNPTQAEVLRVLGKPKQEELNSKMMDFETFLPMLQHISKNKDTGTYEDFVEGLRVFDKEGNGTVMGAELRHVLATLGERLTEDEVEKLMAGQEDSNGCINYEAFVKHIMAS

SEQ ID NO: 331 - protein, 1935 aa, rat; identical to SEQ ID NO: 311

SEQ ID NO: 332 - protein, 158 aa, rat; identical to SEQ ID NO: 327

SEQ ID NO: 333 - protein, 85 aa, rat
MSKQPISNVRSIQANINIPMGAFRPGAGQPPRRKESTPGTAEGAPATPEEKKPVPGMKKFPGPVVNLSEIQNVKSELKYVPKGEQ

SEQ ID NO: 334 - protein, 194 aa, rat
MPNWGGGAKCGACDKTVYHAEEIQCNGRSFHKTCFHCMACRKALDSTTVAAHESEIYCKVCYGRKYGPKGIGFGQGAGCLSTDTGEHLGLQFQQSPKPARAATTSNPSKFSAKFGESEKCPRCGKSVYAAEKVMGGGKPWHKTCFPCAICGKSLESTNVTDKDGELYCKVCYAKNFGPTGIGFGGLTHQVEKKE

SEQ ID NO: 335 - protein, 377 aa, rat
MCDDEETTALVCDNGSGLVKAGFAGDDAPRAVFPSIVGRPRHQGVMVGMGQKDSYVGDEAQSKRGILTLKYPIEHGIITNWDDMEKIWHHTFYNELRVAPEEHPTLLTEAPLNPKANREKMTQIMFETFNVPAMYVAIQAVLSLYASGRTTGIVLDSGDGVTHNVPIYEGYALPHAIMRLDLAGRDLTDYLMKILTERGYSFVTTAEREIVRDIKEKLCYVALDFENEMATAASSSSLEKSYELPDGQVITIGNERFRCPETLFQPSFIGMESAGIHETTYNSIMKCDIDIRKDLYANNVLSGGTTMYPGIADRMQKEITALAPSTMKIKIIAPPERKYSVWIGGSILASLSTFQQMWISKQEYDEAGPSIVHRKCF

SEQ ID NO: 336 - protein, 259 aa, rat; identical to SEQ ID NO: 325

SEQ ID NO: 337 - protein, 371 aa, rat
MAELQEVQITEEKPLLPGQTPEAAKEAELAARILLDQGQTHSVETPYGSVTFTVYGTPKPKRPAIFTYHDVGLNYKSCFQPLFQFGDMQEIIQNFVRVHVDAPGMEEGAPVFPLGYQYPSQDQLADMIPCILQYLNFSTIIGVGVGAGAYILSRYALNHPDTVEGLVLINIDPNAKGWMDWAAHKLTGLTSSIPEMILGHLFSQEELSGNSELIQKYRSLITHAPNLENIELYWNSYNNRRDLNFERGGEMTLKCPVMLVVGDQAPHEDAVVECNSKLDPTQTSFLKMADSGGQPQLTQPGKLTEAFKYFVQGMGYMASSCMTRLSRSRTASLTSAASIDGSRSRSRTLSQSSESGTLPSGPPGHTMEVSC

SEQ ID NO: 338 - protein, 249 aa, rat
NYWDKFVKRKVLDKHGHIFGRERIAELLGMDLASLEITAHNERKPDPPPGLLTWIMSIDVKYQIWKFGVIFTDNSFLYLGWYMVMSLLGHYNNFFFAAHLLDIAMGVKTLRTILSSVTHNGKQLVMTVGLLAVVVYLYTVVAFNFFRKFYNKSEDEDEPDMKCDDMMTCYLFHMYVGVRAGGGIGDEIEDPAGDEYELYRVVFDITFFFFVIVILLAIIQGLIIDAFGELRDQQEQVKEDMETKCFICG

SEQ ID NO: 339 - protein, 621 aa, rat
EEIVPGPKSRYRIKVEGKKHTLIIEGATKADSAEYSVMTTGGQSSAKLSVDLRPLKITTPLTDQTVKLGKEVCLKCEISENVPGKWTKNGLPVQEGERLKVVHKGRIHKLVIANALIEDEGEYVFTPDAITVPLVCQIHVIDPPKIILDGLEADNTVTVIAGSKLRLEIPVTGEPPPKAIWSRADKAIMEGSGRIRAESYPDSSTLVIDVAERDDSGVYNINLKNEAGEAHASIKLRLWISLILRLAPNVTEVGDDWCIMNWEPPVYDGGSPILGYFIERKKKQSSRWMRLNFDLCKETTFEPKKMIEGVAYEVRIFAVNAIGISKPSMPSKPFVPLAVTSPPTLLAVDSVTDSSVTMKWRPPDQIGAAGLSGYVLEYCFEGSTSAKQSNENGEAANDLPAEDWSLQTQTGSTRPKFTITGLPTDAKIFVRVKAINAAGASETKYYSQPILVKEIIEPPKIRIPRHLKQTYIRRVGEAVNLVIPFQGKPRPELTWKKDGAEIDKNQINIRNSETDTIIFIRKAERSHSGKYDLEVKVDKYVENASIDIQIVDRPGPPQAVTIEDVWGENVALTWTPPKDDGNAAITGYTIQKADKKSMEWFAVIEHYHRTNATITELVIGN

SEQ ID NO: 340 - protein, 857 aa, rat
VNFTVDQIRAIMDKKANIRNMSVIAHVDHGKSTLTDSLVCKAGIIASARAGETRFTDTRKDEQERCITIKSTAISLFYELSENDLNFIKQSKDGSGFLINLIDSPGHVDFSSEVTAALRVTDGALVVVDCVSGVCVQTETVLRQAIAERIKPVLMMNKMDRALLELQLEPEELYQTFQRIVENVNVIISTYGEGESGPMGNIMIDPVLGTVGFGSGLHGWAFTLKQFAEMYVAKFAAKGEGQLGAAERAKKVEDMMKKLWGDRYFDPANGKFSKSANSPDGKKLPRTFCQLILDPIFKVFDAIMNFRKEETAKLIEKLDIKLDSEDKDKEGKPLLKAVMRRWLPAGDALLQMITIHLPSPVTAQKYRCELLYEGPPDDEAAMGIKSCDPKGPLMMYISKMVPTSDKGRFYAFGRVFSGVVSTGLKVRIMGPNYTPGKKEDLYLKPIQRTILMMGRYVEPIEDVPCGNIVGLVGVDQFLVKTGTITTFEHAHNMRVMKFSVSPVVRVAVEAKNPADLPKLVEGLKRLAKSDPMVQCIIEESGEHIIAGAGELHLEICLKDLEEDHACIPIKKSDPVVSYRETVSEESNVLCLSKSPNKHNRLYMKARPFPDGLAEDIDKGEVSARQELKARARYLAEKYEWDVAEARKIWCFGPDGTGPNILTDITKGVQYLNEIKDSVVAGFQWATKEGALCEENMRGVRFDVHDVTLHADAIHRGGGQIIPTARRCLYASVLTAQPRLMEPIYLVEIQCPEQVVGGIYGVLNRKRGHVFEESQVAGTPMFVVKAYLPVNESFGFTADLRSNTGGQAFPQCVFDHWQILPGDPFDNSSRPSQVVAETRKRKGLKEGIPALDNFLDKL

SEQ ID NO: 341 - protein, 342 aa, rat
MALRVGLGLGQLEALFILLLIGLLQSRIGADGTEASCGAVIQPRITGGGSAKPGQWPWQVSITYNGVHVCGGSLVSNQWVVSAAHCFPREHSKEEYEVKLGAHQLDSFSNDIVVHTVAQIISHSSYREEGSQGDIALIRLSSPVTFSRYIRPICLPAANASFPNGLHCTVTGWGHVAPSVSLQTPRPLQQLEVPLISRETCSCLYNINAVPEEPHTIQQDMLCAGYVKGGKDACQGDSGGPLSCPIDGLWYLAGIVSWGDACGAPNRPGVYTLTSTYASWIHHHVAELQPRAVPQTQESQPDGHLCNHHPVFNLAAAQKLSRPILFLPLSLTLGLFSLWLEH

SEQ ID NO: 342 - protein, 342 aa, rat; identical to SEQ ID NO: 341

SEQ ID NO: 343 - protein, 223 aa, rat
MSQTKTAKVRVTLFFILAGGVLAMVAVVTDHWAVLSPHLEHHNETCVAAHFGLWRICTTWVAMHNQDKNCDGTIPAGEKNCSYFRHFNPGESSEIFEFTTQKEYSISAAAIAIFSLGFIIIGSICAFLSFGNKRDYLLRPASMFYAFAGLCLIVSVEVMRQSVKRMIDSEDTVWIEYYYSWSFACACAGFTLLFLGGLFLLLFSLPRMPQNPWESCMDTESEH

SEQ ID NO: 344 - protein, 1453 aa, rat
MFSFVDLRLLLLLGATALLTHGQEDIPEVSCIHNGLRVPNGETWKPDVCLICICHNGTAVCDGVLCKEDLDCPNPQKREGECCPFCPEEYVSPDAEVIGVEGPKGDPGPQGPRGPVGPPGQDGIPGQPGLPGPPGPPGPPGPLGLGGNFASQMSYGYDEKSAGVSVPGPMGPSGPRGLPGPPGAPGPQGFQGPPGEPGEPGGSGPMGPPGPPGPPGKNGDDGEAGKPGRPGERGPPGPQGARGLPGTAGLPGMKGHRGFSGLDGAKGDTGPAGPKGEPGSPGENGTPGQMGPRGLPGERGRPGPPGTAGARGNDGAVGAAGPPGPTGPTGPPGFPGAAGAKGEAGPQGARGSEGPQGVRGEPGPPGPAGAAGPAGNPGADGQPGAKGANGAPGIAGAPGFPGARGPSGPQGPSGAPGPKGTSGEPGAPGNKGDTGAKGEPGPAGVQGPPGPAGEEGKRGARGEPGPSGLPGPPGERGGPGSRGFPGADGVAGPKGPSGERGSPGPAGPKGSPGEAGRPGEAGLPGAKGLTGSPGSPGPDGKTGPPGPAGQDGRPGPAGPPGARGQAGVMGFPGPKGTAGEPGKAGERGVPGPPGAVGPAGKDGEAGAQGAPGPAGPAGERGEQGPAGSPGFQGLPGPAGPPGEAGKPGEQGVPGDLGAPGPSGARGERGFPGERGVQGPPGPAGPRGNNGAPGNDGAKGDTGAPGAPGSQGAPGLQGMPGERGAAGLPGPKGDRGDAGPKGADGSPGKDGVRGLTGPIGPPGPAGAPGDKGEAGPSGPAGPTGARGAPGDRGEAGPPGPAGFAGPPGADGQPGAKGEPGDTGVKGDAGPPGPAGPAGPPGPIGNVGAPGPKGSRGAAGPPGATGFPGAAGRVGPPGPSGNAGPPGPPGPVGKEGGKGPRGETGPAGRPGEVGPPGPPGPAGEKGSPGADGPAGSPGTPGPQGIAGQRGVVGLPGQRGKRGFPGLPGPSGEPGKQGPSGASGERGPPGPMGPPGLAGPPGESGREGSPGAEGSPGRDGAPGAKGDRGETGPAGPPGAPGAPGAPGPVGPAGKNGDRGETGPAGPAGPIGPAGARGPAGPQGPRGDKGETGEQGDRGIKGHRGFSGLQGPPGSPGSPGEQGPSGASGPAGPRGPPGSAGSPGKDGLNGLPGPIGPPGPRGRTGDSGPAGPPGPPGPPGPPGPPSGGYDFSFLPQPPQEKSQDGGRYYRADDANVVRDRDLEVDTTLKSLSQQIENIRSPEGSRKNPARTCRDLKMCHSDWKSGEYWIDPNQGCNLDAIKVYCNMETGQTCVFPTQPSVPQKNWYISPNPKEKKHVWFGESMTDGFQFEYGSEGSDPADVAIQLTFLRLMSTEASQNITYHCKNSVAYMDQQTGNLKKSLLLQGSNEIELRGEGNSRFTYSTLVDGCTSHTGTWGKTVIEYKTTKTSRLPIIDVAPLDIGAPDQEFGMDIGPACFV

SEQ ID NO: 345 - protein, 582 aa, rat
MAESAESGGPPGAQDSAADSGPAEPKIMKVTVKTPKEKEEFAVPENSSVQQFKEEISKRFKSHIDQLVLIFAGKILKDQDTLSQHGIHDGLTVHLVIKTQNRPQDNSAQQTNTTGNSVTSSPAPDSNPTSGPAANSSFGLGGLGGLAGLSSLGLNTTNFSELQSQMQRQLLSNPEMMVQIMENPFVQSMLSNPDLMRQLIMANPQMQQLIQRNPEISHMLNNPNIMRQTLELARNPAMMQEMMRNQERDLSNLESIPGGYNALRRMYTDIQEPMLNAAQEQFGGNPFASLVSSPSSAEGTQPSRTENRDPLPNPWAPQTPQSSPASGSTGSTTNTVSTSAGNATSTPAGQGTSGPNLVPGAGASMFNTPGMQSLLQQITENPQLMQNMLSAPYMRSMMQSLSQNPDLAAQMMLNNPLFAGNPQLQEQMRQQLPTFLQQMQNPDTLSAMSNPRAMQALLQIQQGLQTLATEAPGLIPGFTPGLAAGNSGGPAGTTAPSTAPGEDTNPQGGAAEPGHQQFIQQMLQALAGVNPQLQSPEVRFQQQLEQLSAMGFLNREANLQALIATGGDINAAIERLLGSQPS

SEQ ID NO: 346 - protein, 70 aa, rat
GTSKDPTQPPPPPLQHYLEQPVERVQKYQALLKELIRNKARNRQNCALLEQAYAVVSALPQRAENKLHVS

SEQ ID NO: 347 - protein, 166 aa, rat
MASGVAVSDGVIKVFNDMKVRKSSTPEEVKKRKKAVLFCLSEDKKNIILEEGKEILVGDVGQTVDDPYTTFVKMLPDKDCRYALYDATYETKESKKEDLVFIFWAPESAPLKSKMIYASSKDAIKKKLTGIKHELQANCYEEVKDRCTLAEKLGGSAVISLEGKPL

SEQ ID NO: 348 - protein, 621 aa, rat; identical to SEQ ID NO: 339

SEQ ID NO: 349 - protein, 182 aa, rat; identical to SEQ ID NO: 320

SEQ ID NO: 350 - protein, 377 aa, rat
MCDEDETTALVCDNGSGLVKAGFAGDDAPRAVFPSIVGRPRHQGVMVGMGQKDSYVGDEAQSKRGILTLKYPIEHGIITNWDDMEKIWHHTFYNELRVAPEEHPTLLTEAPLNPKANREKMTQIMFETFNVPAMYVAIQAVLSLYASGRTTGIVLDSGDGVTHNVPIYEGYALPHAIMRLDLAGRDLTDYLMKILTERGYSFVTTAEREIVRDIKEKLCYVALDFENEMATAASSSSLEKSYELPDGQVITIGNERFRCPETLFQPSFIGMESAGIHETTYNSIMKCDIDIRKDLYANNVMSGGTTMYPGIADRMQKEITALAPSTMKIKIIAPPERKYSVWIGGSILASLSTFQQMWITKQEYDEAGPSIVHRKCF

SEQ ID NO: 351 - protein, 380 aa, rat
MTNIRKSHPLFKIINHSFIDLPAPSNISSWWNFGSLLGVCLMVQILTGLFLAMHYTSDTMTAFSSVTHICRDVNYGWLIRYLHANGASMFFICLFLHVGRGLYYGSYTFLETWNIGIILLFAVMATAFMGYVLPWGQMSFWGATVITNLLSATPYIGTTLVEWIWGGFSVDKATLTRFFAFHFILPFIIAALAIVHLLFLHETGSNNPTGLNSDADKIPFHPYYTIKDLLGVFMLLLFLMTLVLFFPDLLGDPDNYTPANPLNTPPHIKPEWYFLFAYAILRSIPNKLGGVVALILSILILAFLPFLHTSKQRSLTFRPITQILYWILVANLLVLTWIGGQPVEHPFIIIGQLASISYFSIILILMPISGIVEDKMLKWN

SEQ ID NO: 352 - protein, 186 aa, rat
PEVERKSKITASRKLMLKSLMLAKAKECWEQEHEEREAEKVRYLSERIPTLQTRGLSLSALQDLCRELHAKVEVVDEERYDIEAKCLHNTREIKDLKLKVLDLRGKFKRPPLRRVRVSADAMLRALLGSKHKVSMDLRANLKSVKKEDTEKERPVEVGDWRKNVEAMSGMEGRKKMFDAAKSPTLQ

SEQ ID NO: 353 - protein, 561 aa, rat
VKIVTVKTQAYPDQKPGTSGLRKRVKVFQGNANYAENFIQSIVSTVEPALRQEATLVVGGDGRFYMTEAIQLIVRIAAANGIGRLVIGQNGILSTPAVSCIIRKIKAIGGIILTASHNPGGPNGDFGIKFNISNGGPAPEAITDKIFQISKTIEEYAICPDLKVDLGVLGKQQFDLENKFKPFTVEIVDSVEAYATMLRNIFDFNALKELLSGPNRLKIRIDAMHGVVGPYVKKILCEELGAPANSAVNCVPLEDFGGHHPDPNLTYAADLVETMKSGEHDFGAAFDGDGDRNMILGKHGFFVNPSDSVAVIAANIFSIPYFQQTGVRGFARSMPTSGALDRVANATKIASYETPTGWKFFGNLMDASKLSLCGEESFGTGSDHIREKDGLWAVLAWLSILATRKQRVEDILKDHWQKFGRNFFTRYDYEEVEAEGANKMMKDLEALMLDRSFVGKQFSANDKVYTVEKADNFEYSDPVDGSISKNQGLRLIFADGSRIIFRLSGTGSAGATIRLYIDSYEKDAAKINQDPQVMLAPLISIALKVSQLQERTGRTAPTVIT

SEQ ID NO: 354 - protein, 150 aa, rat
MSFSADQIAEFKEAFLLFDRTGECKITLSQVGDVLRALGTNPTNAEVKKVLGNPSNEEMNAKKIEFEQFLPMMQAISNNKDQGGYEDFVEGLRVFDKEGNGTVMGAELRHVLATLGEKMKEEEVEALLAGQEDSNGCINYEAFVKHIMSV

SEQ ID NO: 355 - protein, 205 aa, rat
MEFLWAPLLGLCCSLAAVDRHIVFWNSSNPKFREEDYTVHVQLNDYLDIICPHYEDDSVADAAMERYSLYMVEHQEYVTCEPQSKDQVRVKCNQPSAKHGPEKLSEKFQRFTPFTLGKEFKEGHSYYYISKPIYHQETQCLKLKVTVNGKITHSPHAHVNPQEKRLQADDPEVQVLHSIGHSAAPRLFPLVWAVLLLPLLLLQTQ

SEQ ID NO: 356 - protein, 150 aa, rat; identical to SEQ ID NO: 354

SEQ ID NO: 357 - protein, 284 aa, rat
MDAIKKKMQMLKLDKENAIDRAEQAEADKKQAEDRCKQLEEEQQALQKKLKGTEDEVEKYSESVKDAQEKLEQAEKKATDAEADVASLNRRIQLVEEELDRAQERLATALQKLEEAEKAADESERGMKVIENRAMKDEEKMELQEMQLKEAKHIAEDSDRKYEEVARKLVILEGELERSEERAEVAESRARQLEEELRTMDQALKSLIASEEEYSTKEDKYEEEIKLLEEKLKEAETRAEFAERSVAKLEKTIDDLEETLASAKEENVEIHQTLDQTLLELNNL

SEQ ID NO: 358 - protein, 796 aa, rat
MDSWFILILFGSGLIHISANNTTTVSPSLGTTRLIKTSTTESAKEENKTSNSTSSVISLSVTPTFSPNLTLEPTYVTTVNSSHSDNGTKRAASTESGGTTISPNGTYGTWLTDNQFTDARTEPWEGNSSSAATTPETFPPADETPIIAVMVALSSLLVILFIIIVLYMLRFKKYKQAGSHSNSFRLSNGRTEDVEPQSVPLLARSPSTNRKYPPLPVDKLEEEINRRMADDNKLFREEFNALPACPIQATCEAASKEENKEKNRYVNLLPYDHSRVHLTPVEGVPDSDYINASFINGYQEKNKFIAAQGPKEETVNDFWRMIWEQNTATIVMVTNLKERKECKCAQYWPDQGCWPYGNVRVSVEDVTVLVDYTVRKFCIQQVGDVTNRKPQRLITQFHFTSWPDFGVPFTPIGMLKFLKKVKACNPQYAGAIVVHCSAGVGRTGTFVVIDAMLDMMHSERKVDVYGFVSRIRAQRCQMVQTDMQYVFIYQALLEHYLYGDTELEVTSLDTHLQKIYNKIPGTSNNGLEEEFKKLTSIKIQNDKMRTGYLPANMKKNRVLQIIPYEFNRVIIPVKRGEENTDYVNASFIDPYRQKDSYIASQGPLLHTTEDFWRMIWEWKSCSIVMLTELEERGQEKCAQYWPSDGLVSYGDITVELKKEEECESYTVRDLLVTNTRENKSRQIRQFHFHGWPEVGIPSDGKGMINIIAAVQKQQQQSGNHPITVHCSAGAGRTGTFCALSTVLECVKAEGILDVFQTVKTLRLQRPHMVQILEQYEFCYKVVQEYIDAFSDYANFK

SEQ ID NO: 359 - protein, 332 aa, rat
TDQAFVTLTTNDAYAKGALVLGSSLKQHRTTRRTVVLASPQVSDSMRKVLETVFDEVIMVDVLDSGDSAHLTLMKRPELGITLTKLHCWSLTQYSKCVFMDADTLVLSNIDDLFEREELSAAPDPGWPDCFNSGVFVYQPSIETYNQLLHLASEQGSFDGGDQGLLNTYFSGWATTDITKHLPFVYNLSSLSIYSYLPAFKAFGKNAKVVHFLGRTKPWNYTYNPQTKSVKCESQDPIVSHPEFLNLWWDTFTTNVLPLLQHHGLVKDAGSYLMMEHVTGALSDLSFGEAPPASQPSLSSEERKERWEQGQADYMGADSFDNIKRKLDTYLQ

SEQ ID NO: 360 - protein, 332 aa, rat; identical to SEQ ID NO: 359

SEQ ID NO: 361 - protein, 257 aa, rat
RAALQAEIEELRATLEQTERSRKIAEQELLDASERVQLLHTQNASLINAKKKLENDVSQLQSEVEEVIQRARNAEEKAKKAITDAAMMAEELKKEQDTSAHLERMKKNMEQTVKDLQHRLDEAEQLALKGGKKQIQKLEARVRELEGEVENEQKRNAEAVKGLRKHERRVKELTYQTEEDRKNVLRLQDLVDKLQAKVKSYKRQAEEAEEQSNVNLAKFRKLQHELEEAEERADIAESQVNKLRVKSREVHTKISAE

SEQ ID NO: 362 - protein, 821 aa, rat
MPTVISPTVAPRTGAEPRSPGPVPHPAQGKTTEAGGGHPGGIYSAIISRNFPIIGVKEKTFEQLHKKCLEKKVLYLDPEFPPDETSLFYSQKFPIQFVWKRPPEICENPRFIIGGANRTDICQGDLGDCWLLAAIACLTLNERLLFRVIPHDQSFTENYAGIFHFQFWRYGDWVDVVIDDCLPTYNNQLVFTKSNHRNEFWSALLEKAYAKLHGSYEALKGGNTTEAMEDFTGGVTEFFEIKDAPSDMYKIMRKAIERGSLMGCSIDDGTNMTYGTSPSGLNMGELIARMVRNMDNSLLRDSDLDPRASDDRPSRTIVPVQYETRMACGLVKGHAYSVTGLEEALFKGEKVKLVRLRNPWGQVEWNGSWSDGWKDWSFVDKDEKARLQHQVTEDGEFWMSYDDFVYHFTKLEICNLTADALESDKLQTWTVSVNEGRWVRGCSAGGCRNFPDTFWTNPQYRLKLLEEDDDPDDSEVICSFLVALMQKNRRKDRKLGANLFTIGFAIYEVPKEMHGNKQHLQKDFFLYNASKARSKTYINMREVSQRFRLPPSEYVIVPSTYEPHQEGEFILRVFSEKRNLSEEAENTISVDRPVKKKKNKPIIFVSDRANSNKELGVDQEAEEGKDKTGPDKQGESPQPRPGHTDQESEEQQQFRNIFRQIAGDDMEICADELKNVLNTVVNKHKDLKTQGFTLESCRSMIALMDTDGSGRLNLQEFHHLWKKIKAWQKIFKHYDTDHSGTINSYEMRNAVNDAGFHLNSQLYDIITMRYADKHMNIDFDSFICCFVRLEGMFRAFHAFDKDGDGIIKLNVLEWLQLTMYA

SEQ ID NO: 363 - protein, 1009 aa, rat
MAGTYSSTLKTLEDLTLDSGYGAGDSCRSLSLSSSKSNSQALNSSAPQHRGAAWWCYSGSMNSRHNSWDTVNTVLPEDPEVADLFSRCPRLPELEEFPWTEGDVARVLRKSVGGRRLPSFSAEAVRRLAGLLRRALIRVAREAQRLSVLHAKCTRFEVQSAVRLVHSWALAESCALAAVKALSLYSMSAGDGLRRGKSARCGLTFSVGRFFRWMVDTRISVRIHEYAAISLTACMENLVEEIRARVLASQSPDGGGAGGGEVSAEALEMVINNDAELWGVLQPYEHLICGKNANGVLSLPAYFSPYNGGSLGHDERADAYAQLELRTLEQSLLATCVGSISELSDLVSRAMHHMQGRHPLCPGTSPARQARQPPQPITWSPDALHTLYYFLRCPQMESMENPNLDPPRMTLNNERPFMLLPPLMEWMRVAITYAEHRRSLTVDSGDIRQAARLLLPGLDCEPRQLKPECCFSSFRRLDARAATERFNQDLGFRMLNCGRTDLISQPSSPGPDGVNTMDDQGLTPLMYACATGDEAMVQMLIDAGANLDIQVPSNSPRHPSVHPDSRHWTSLTFAVLHGHISVVQLLLDAGAHVEGSAVNSGEDSYAETPLQLASAAGNYELVSLLLSRGADPLLSMLEANGMASSLHEDMNCFSHSAAHGHRNVLRKLLTQPQQAKADVLSLEEILAEGVEESDTSSQGSSEGPVRLSRTRTKALQEAMYYSAEHGYVDITMELRALGVPWKLHIWIESLRTSFSQSRYSVVQGLLRDFSSIKEEEYNEELVTEGLQLMFDILKTSKNDSVLQQLATIFTHCYGTSPIPSIPEIRKTLPARLDPHFLNNKEMSDVTFLVEGKLFYAHKVLLVTASNRFKTLMTNKSEQDGDNSKTIEISDIKYHIFQMLMQYLYYGGTESMEIPTADILQLLSAANLFQLDALQRHCEILCSQTLSVESAVNTYKYAKIHNAPELALFCEGFFLKHMKALLEQMPSGSSSMAEAAKSRAWTHCRICRAP

SEQ ID NO: 364 - protein, 461 aa, rat
MLELRHRGGCPGPGGAGTPPPREGEAAGGDHETESTSDKETDIDDRYGDLDARGDSDVPEVPPSSDRTPEILKKALSGLSSRWKNWWIRGILTLTMISLFFLIIYMGSFMLMLLVLGIQVKCFQEIITIGYRVYHSYDLPWFRTLSWYFLLCVNYFFYGETVADYFATFVQREEQLQFLIRYHRFISFALYLAGFCMFVLSLVKKHYRLQFYMFAWTHVTLLITVTQSHLVIQNLFEGMIWFLVPISSVICNDITAYLFGFFFGRTPLIKLSPKKTWEGFIGGFFSTVIFGFIAAYVLSKYQYFVCPVEYRSDVNSFVTECEPSELFQLQNYSLPPFLQAVLSRETVSLYPFQIHSIALSTFASLIGPFGGFFASGFKRAFKIKDFANTIPGHGGIMDRFDCQYLMATFVHVYITSFIRGPNPSKVLQQLLVLQPEQQLNIYRTLKIHLTEKGILQPTWKV

SEQ ID NO: 365 - protein, 362 aa, rat
MPQNVVLPGPASWGFRLSGGIDFNQPLVITRITPGSKAEAANLCPGDMILAIDGFGTESMTHADAQDRIKAASYQLCLKIDRAETRLCPAVSEDGKAHPFKINLEAEPQDVNYFEHKHNIRPKPFIIPGRTSGCSTPSGIDCGSGRSTPSSVSTVSTICPGDLKVAAKMAPNIPLEMELPGVKIVHAQFNTPMQLYSDDNIMETLQGQVSTALGETPSMSEPTASVPPQSDVYRMLHDNRDEPAAPRQSGSFRVLQELVNDGSDDRPAGTRSVRPVTKVHGGAGGAQRMPLCDKCGSGIVGAVVKARDKYRHPECFVCADCNLNLKQKGYFFVEGELYCEMHARARARPPEGYDTVTLYPKA

SEQ ID NO: 366 - protein, 568 aa, rat
MVLDPEEKIPDDGASGDHGDSASLGAINPAYSNSSLPHSTGDSEEPFTTYFDEKIPIPEEEYSCFSFRKLWAFTGPGFLMSIAYLDPGNIESDLQSGAVAGFKLLWVLLLATIVGLLLQRLAARLGVVTGLHLAEVCHRQYPKVPRIILWLMVELAIIGSDMQEVIGSAIAINLLSAGRVPLYGGVLITIADTFVFLFLDKYGLRKLEAFFGFLITIMALTFGYEYVTVKPSQSQVLRGMFVPSCSGCHTPQVEQAVGIVGAVIMPHNMYLHSALVKSRQVNRANKQEVREANKYFFIESCIALFVSFIINVFVVSVFAEAFFEKTNEQVVEVCRNSSSPHADLFPNDNSTLAVDIYKGGVVLGCYFGPAALYIWAVGILAAGQSSTMTGTYSGQFVMEGFLNLKWSRFARVILTRSIAIIPTLLVAVFQDVEHLTGMNDFLNVLQSLQLPFALIPILTFTSLRPVMSEFSNGIGWRIAGGILVLLVCSINMYFVVVYVQELGHVALYVVAAVVSVAYLGFVFYLGWQCLIALGLSFLDCGRSYHLGLTARPEIYLLNTVDAVSLVSR

SEQ ID NO: 367 - protein, 384 aa, rat
MKVTSLDGRRLRKMLRKEAEARCVVLDCRPYLAFAASSVRGSLNVNLNSVVLRRARGGAVSARYVLADEAARARLLQEGGGGVAAVVVLDQGSRHWQKLREESAARVVLTSLLACLSAGPRVYFLKGGYETFYSQYPECCVDAKPISQEKLEGERGLLSQCGKPILSVAYRPAYDQGGPVEILPFLYLGSAYHASKCEFLANLHITALLNVSRRTSEACTTHLHYKWIPVEDSHTADISSHFQEAIDFIDCVREEGGKVLVHCEAGVSRSPTICMAYLMKTKQFRLKEAFEYIKQRRSVVSPNFGFMGQLLQYESEILPSTPTPQPPSCQGEAASSTFIGHLQTLSPDMQGAYCTFPTSVLAPVPTHATVAELHRSPVATATSC

SEQ ID NO: 368 - protein, 293 aa, rat
MAMNKSVGLFSSASLAVDYVDSLLPENPLQEPFKNAWVYMLDNYTKFQIATWGSLIVHETIYFLFSLPGFLFQFIPFMRKYKIQKDKPETFEGQWKCLKGILFNHFFIQLPLICGTYYFTEFFNIPYDWERMPRWYFTLARCLGCAVIEDTWHYFLHRLLHHKRIYKYIHKVHHEFQAPFGIEAEYAHPLETLILGTGFFIGIVLLCDHVILLWAWVTMRLLETIDVHSGYDIPLNPLNYIPFYTGARHHDFHHMNFIGNYASTFTWWDRIFGTDVQYHAYTEKMKKLGKKSE

SEQ ID NO: 369 - protein, 259 aa, rat; identical to SEQ ID NO: 325

SEQ ID NO: 370 - protein, 722 aa, rat
MAGAEGFQYRAVYPFRRERPEDLELLPGDLLVVSRVALQALGVADGGERCPHNVGWMPGFNERTRQRGDFPGTYVEFLGPVALARPGPRPRGPRPLPARPLDGPSESGHTLASLAEQFSPPESAPPILVKLIEAIEQAELDSEFYSRPELPAPRTDWSLSDLEQWDRTTLYDAVKGFLLALPAAVVTPEAASEAYRAMREVTGPVGLVLEPPTLPLHQALTLRFLLQHLGRVARRAPSPATAVHALASAFGPLLLRAPPPGGEGDGSEPAPDFPVLLLERLVQEHVDEQDTAPPALPPKPSKVKPAPTALANGGSTPSLQDAEWYWGDISREEVNERLRDTPDGTFLVRDASSKIQGEYTLTLRKGGNNKLIKVFHRDGHYGFSEPLTFCSVVELISHYRHESLAQYNAKLDTRLLYPVSKYQQDQVVKEDSVEAVGAQLKVYHQQYQDKSREYDQLYEEYTRTSQELQMKRTAIEAFNETILIFEEQGQTQEKCSKEYLERFRREGNEKEMQRILLNSERLKSRIAEIHESRTKLEQDLRAQASDNREIDKRMNSLKPDLMQLRKIRDQYLVWLTQKGARQRKINEWLGIKNETEDQYSLMEDEDALPHHEERTWYVGKINRTQAEEMLSAKRDGTFLIRESSQRGCYACSVVVDGDTKHCVIYRTATGFGFAEPYNLYGSLKELVLHYQHASLVQHNDALTVTLAHPVRAPGPGPPPAAR

SEQ ID NO: 371 - protein, 821 aa, rat; identical to SEQ ID NO: 362

SEQ ID NO: 372 - protein, 484 aa, rat; identical to SEQ ID NO: 322

SEQ ID NO: 373 - protein, 455 aa, rat
MPKLHQPLVNRQGASGFPSTTLPDSKQPHRKVSLGRKEAELQAAPPPRRDTCLRGPKPRGEAAGACEPLGQLPSTGFRAATGQLRRAAAPLSARPRGRGIRRAVCGQEDRPPASVPDGSEAAPHARPPAMLLSKFGSLAHLCGPGGVDHLPVKILQPAKADKESFEKVYQVGAVLGSGGFGTVYAGSRIADGLPVAVKHVVKERVTEWGSLGGMAVPLEVVLLRKVGAAGGARGVIRLLDWFERPDGFLLVLERPEPAQDLFDFITERGALDEPLARRFFAQVLAAVRHCHNCGVVHRDIKDENLLVDLRSGELKLIDFGSGAVLKDTVYTDFDGTRVYSPPEWIRYHRYHGRSATVWSLGVLLYDMVCGDIPFEQDEEILRGRLFFRRRVSPECQQLIEWCLSLRPSERPSLDQIAAHPWMLGTEGSVPENCDLRLCALDTDDGASTTSSSESL

SEQ ID NO: 374 - protein, 69 aa, rat
MKTHYFLLVMLFFLFSQMELGAGILTSLGRRTDQYRCLQNGGFCLRSSCPSHTKLQGTCKPDKPNCCRS

SEQ ID NO: 375 - protein, 573 aa, rat
MWTFLGIATFTYFYKKCGDVTLANKELLLCVLVFLSLGLVLSYRCRHRNGGLLGRHQSGSQFAAFSDILSALPLIGFFWAKSPPESEKKEQLESKRRRKEVNLSETTLTGAATSVSTSSVTDPEVIIIGSGVLGSALATVLSRDGRTVTVIERDLKEPDRILGECLQPGGYRVLRELGLGDTVESLNAHHIHGYVIHDCESRSEVQIPYPVSENNQVQSGVAFHHGKFIMSLRKAAMAEPNVKFIEGVVLRLLEEDDAVIGVQYKDKETGDTKELHAPLTVVADGLFSKFRKNLISNKVSVSSHFVGFIMKDAPQFKANFAELVLVDPSPVLIYQISPSETRVLVDIRGELPRNLREYMTEQIYPQIPDHLKESFLEACQNARLRTMPASFLPPSSVNKRGVLLLGDAYNLRHPLTGGGMTVALKDIKIWRQLLKDIPDLYDDAAIFQAKKSFFWSRKRSHSFVVNVLAQALYELFSATDDSLRQLRKACFLYFKLGGECLTGPVGLLSILSPDPLLLIRHFFSVAVYATYFCFKSEPWATKPRALFSSGAILYKACSIIFPLIYSEMKYLVH

SEQ ID NO: 376 - protein, 182 aa, rat
KAKKAITDAAMMAEELKKEQDTSAHLERMKKNMEQTVKDLQLRLDEAEQLALKGGKKQIQKLEARVRELEGEVESEQKRNVEAVKGLRKHERRVKELTYQTEEDRKNILRLQDLVDKLQAKVKSYKRQAEEAEEQSNTNLSKFRKLQHELEEAEERADIAESQVNKLRVKSREVHTKVISEE

SEQ ID NO: 377 - protein, 56 aa, rat
MLELIEVNGTPGSQLSTPRSGKSPSPSPTSPGSLRKQRDLYRPLSSDDLDSVGDSV

SEQ ID NO: 378 - protein, 447 aa, rat
MAGAGGGNDIQWCFSQVKGAVDDDVAEADIISTVEFNHSGELLATGDKGGRVVIFQQEQENKIQSHSRGEYNVYSTFQSHEPEFDYLKSLEIEEKINKIRWLPQKNAAQFLLSTNDKTIKLWKISERDKRPEGYNLKEEDGRYRDPTTVTTLRVPVFRPMDLMVEASPRRIFANAHTYHINSISINSDYETYLSADDLRINLWHLEITDRSFNIVDIKPANMEELTEVITAAEFHPNSCNTFVYSSSKGTIRLCDMRASALCDRHSKLFEEPEDPSNRSFFSEIISSISDVKFSHSGRYMMTRDYLSVKVWDLNMENRPVETYQVHEYLRSKLCSLYENDCIFDKFECCWNGSDSVVMTGSYNNFFRMFDRNTKRDITLEASRENNKPRTVLKPRKVCASGKRKKDEISVDSLDFNKKILHTAWHPKENIIAVATTNNLYIFQDKVN

SEQ ID NO: 379 - protein, 197 aa, rat
IGSRGVGKTSLMERFTDDTFCEACKSTVGVDFKIKTVELRGKKIRLQIWDTAGQERFNSITSAYYRSAKGIILVYDITKKETFDDLPKWMKMIDKYASEDAELLLAGNKLDCETDREISRQQGEKFAQQITGMRLSEPSAKDNFNVDEIFLKLVDDILKKMPLDVLRSELSNSILSLQPEPEIPPELPPPRPHVRCC

SEQ ID NO: 380 - protein, 318 aa, rat
MELLSPPLRDTDLLGPDGSLCSFATRDDFYDDPCFDSPDLRFFEDLDPRLVHVGALLKPEEHAHFPTTVHPGPGAREDEHVRAPSGHHQAGRCLLWACKACKRKTTNADRRKAATMRERRRLSKVNEAFETLKRCTSSNPNQRLPKVEILRNAIRYIEGLQALLRDQDAAPPGAAAFYAPGPLPPGRGSEHYSGDSDASSPRSNCSDGMMDYSGPPSGPRRQNGYDAAYYSEASSEPRPGKSAAVSSLDCLSSIVERISTDSPAAPSLLLPDAPPESPPGPPEETSSSDAEQGTQTPSPDSTPQCPAGSKPNPIYQVL

SEQ ID NO: 381 - protein, 1091 aa, rat
MAAGCLLALTLTLFQSWLIGPSSEEPFPSPVTIKSWVDKMQEDLVTLAKTASGVTQLADIYEKYQDLYTVEPNNARQLVEIAARDIEKLLSNRSKALVRLAMEAEKVQAAHQWREDFASNEVVYYNAKDDLDPERNESESGSQRIKPVFIEDANFGRQISYQHAAVHIPTDIYEGSTIVLNELNWTSALDEVFKRNRDEDPTLLWQVFAADRLARYYPASPWVDNSRTPNKIDLYDVRRRPWYIQGAASPKDMLILVDVSGSVSGLTLKLIRTSVSEMLETLSDDDFVNVASFNSNAQDVSCFQHLVQANVRNKKVLKDAVNNITAKGITDYKKGFTFAFEQLLNYNVSRANCNKIIMLFTDGGEERAQEIFAKYNKDKKVRVFTFSVGQHNYDRGPIQWMACENKGYYYEIPSIGAIRINTQEYLDVLGRPMVLAGDKAKQVQWTNVYLDALELGLVITGTLPVFNVTGQSENKTNLKNQLILGVMGVDVSLEDIKRLTPRFTLCPNGYYFAIDPNGYVLLHPNLQPKNPKSQEPVTLDFLDAELENDIKVEIRNKMIDGESGEKTFRTLVKSQDERYIDKGNRTYTWTPVNGTDYRYLALVLPTYSFYYIKAKIEETITQARSKKGKMKDSETLKPDNFEESGYTFIAPREYCNDLKPSDNNTEFLLNFNEFIDRKTPNNPSCNTDLINRILLDAGFTNELVQNYWSKQKNIKGVKARFVVTDGGITRVYPKEAGENWQENPETYEDSFYKRSLDNDNYVFTAPYFNKSGPGAYESGIMVSKAVELYIQGKLLKPAVVGIKIDVNSWIENFTKTSIRDPCAGPVCDCKRNSDVMDCVILDDGGFLLMANHDDYTNQIGRFFGEIDPRMMRHLVNISLYAFNKSYDYQSVCDPGAAPKQGAGHRSAYVPSITDILQIGWWATAAAWSILQQLLLSLTFPRLLEAVEMEEDDFTASLSKQSCITEQTQYFFKNDTKSFSGLLDCGNCSRIFHVEKLMNTNLVFIMVESKGTCPCDTRLLMQAEQTSDGPDPCDMVKQPRYRKGPDVCFDNNVLEDYTDCGGVSGLNPSLWSIFGLQFILLWLVSGSRHYLW

SEQ ID NO: 382 - protein, 353 aa, rat
MNGDQKLDVHNQEKQNFIQHFSQIVKVLTEDELGHPEKGDAITRIKEVLEYNTVGGKYNRGLTVVQTFQELVEPRKQDAESLQRALTVGWCVELLQAFFLVLDDIMDSSHTRRGQICWYQKPGIGLDAINDALLLEAAIYRLLKFYCREQPYYLNLLELFLQSSYQTEIGQTLDLITAPQGQVDLGRYTEKRYKSIVKYKTAFYSFYLPIAAAMYMAGIDGEKEHANALKILLEMGEFFQIQDDYLDLFGDPSVTGKVGTDIQDNKCSWLVVQCLLRATPQQRQILEENYGQKDPEKVARVKALYEELDLRSVFFKYEEDSYNRLKSLIEQCSAPLPPSIFLELANKIYKRRK

SEQ ID NO: 383 - protein, 4644 aa, rat
MSETGGGEDGSAGLEVSAVQNVADVSVLQKHLRKLVPLLLEDGGDAPAALEAALEEKSALEQMRKFLSDPQVHTVLVERSTLKEDVGDEGEEEKEFISYNINIDIHYGVKSNSLAFIKRAPVIDADKPVSSQLRVLTLSEDSPYETLHSFISNAVAPFFKSYIRESGKADRDGDKMAPSVEKKIAELEMGLLHLQQNIEIPEISLPIHPIITNVAKQCYERGEKPKVTDFGDKVEDPTFLNQLQSGVNRWIREIQKVTKLDRDPASGTALQEISFWLNLERALYRIQEKRESPEVLLTLDILKHGKRFHATVSFDTDTGLKQALETVNDYNPLMKDFPLNDLLSATELDKIRQALVAIFTHLRKIRNTKYPIQRALRLVEAISRDLSSQLLKVLGTRKLMHVAYEEFEKVMVACFEVFQTWDDEYEKLQVLLRDIVKRKREENLKMVWRINPAHRKLQARLDQMRKFRRQHEQLRAVIVRVLRPQVTAVAQQNQGEAPEPQDMKVAEVLFDAADANAIEEVNLAYENVKEVDGLDVSKEGTEAWEAAMKRYDERIDRVETRITARLRDQLGTAKNANEMFRIFSRFNALFVRPHIRGAIREYQTQLIQRVKDDIESLHDKFKVQYPQSQACKMSHVRDLPPVSGSIIWAKQIDRQLTAYMKRVEDVLGKGWENHVEGQKLKQDGDSFRMKLNTQEIFDDWARKVQQRNLGVSGRIFTIESARVRGRSGNVLKLKVNFLPEIITLSKEVRNLKWLGFRVPLAIVNKAHQANQLYPFAISLIESVRTYERTCEKVEERNTISLLVAGLKKEVQALIAEGIALVWESYKLDPYVQRLAETVFNFQEKVDDLLIIEEKIDLEVRSLETCMYDHKTFSEILNRVQKAVDDLNLHSYSNLPIWVNKLDMEIERILGVRLQAGLRAWTQVLLGQAEDKAEVDMDTDAPQVSHKPGGEPKIKNVVHELRITNQVIYLNPPIEECRYKLYQEMFAWKMIVLSLPRIQSQRYQVGVHYELTEEEKFYRNALTRSRDGPVALEESYSAVMGIVTEVEQYVKVWLQYQCLWDMQAENIYNRLGEDLSKWQALLVQIRRARGTFDNAETKKEFGPVVIDYGKVQSKVNLKYDSWHKEVLSKFGQMLGSNMTEFHSQISKSRQELEQHSVDTASTSDAVTFITYVQSLKRKIKQFEKQVELYRNGQRLLEKQRFQFPPSWLYIDNIEGEWGAFNDIMRRKDSAIQQQVANLQMKIVQEDRAVESRTTDLLTDWEKTKPVTGNLRPEEALQALTIYEGKFGRLKDDREKCAKAKEALELTDTGLLSGSEERVQVALEELQDLKGVWSELSKVWEQIDQMKEQPWVSVQPRKLRQNLDGLLNQLKNFPARLRQYASYEFVQRLLKGYMKINMLVIELKSEALKDRHWKQLMKRLHVNWVVSELTLGQIWDVDLQKNEAIVKDVLLVAQGEMALEEFLKQIREVWNTYELDLVNYQNKCRLIRGWDDLFNKVKEHINSVSAMKLSPYYKVFEEDALSWEDKLNRIMALFDVWIDVQRRWVYLEGIFTGSADIKHLLPVETQRFQSISTEFLALMKKVSKSPLVMDVLNIQGVQRSLERLADLLGKIQKALGEYLERERSSFPRFYFVGDEDLLEIIGNSKNVAKLQKHFKKMFAGVSSIILNEDSSVVLGISSREGEEVMFKTPVSITEHPKINEWLTLVEKEMRVTLAKLLAESVTEVEIFGKATSIDPNTYITWIDKYQAQLVVLSAQIAWSENVENALSNVGGGGNVGPLQSVLSNVEVTLNVLADSVLMEQPPLRRRKLEHLITELVHQRDVTRSLIKSKIDNAKSFEWLSQMRFYFDPKQTDVLQQLSIQMANAKFNYGFEYLGVQDKLVQTPLTDRCYLTMTQALEARLGGSPFGPAGTGKTESVKALGHQLGRFVLVFNCDETFDFQAMGRIFVGLCQVGAWGCFDEFNRLEERMLSAVSQQVQCIQEALREHSNPNYDKTSAPITCELLNKQVKVSPDMAIFITMNPGYAGRSNLPDNLKKLFRSLAMTKPDRQLIAQVMLYSQGFRTAEVLANKIVPFFKLCDEQLSSQSHYDFGLRALKSVLVSPGNVKRERIQKIKREKEERGEAVDEGEIAENLPEQEILIQSFCETMVPKLVAEDIPLLFSLLSDVFPGVQYHRGEMTDLREELKKVCKEMYLTYGDGEEVGGMWVEKVLQLYQITQINHGLMMVGPSGSGKSMAWRVLLKALERLEGVEGVAHIIDPKAISKDHLYGTLDPNTREWTDGLFTHVLRKIIDNVRGELQKRQWIVFDGDVDPEWVENLNSVLDDNKLLTLPNGERLSLPPNVRIMFEVQDLKYATLATVSRCGMVWFSEDLLSTDMIFNNFLARLRTIPLDEGEDEAQRRRKGKEDEGEEAASPMLQIQRDAATIMQPYFTSNGLVTKALEHAFKLEHIMDLTRLRCLGSLFSMLHQGCRNVAQYNANHPDFPMQIEQLERYIQRYLVYAILWSLSGDSRLKMRAELGEYIRRITTVPLPTAPNIPIIDYEVSISGEWSPWQAKVPQIEVETHKVAAPDVVVPTLDTVRHEALLYTWLAEHKPLVLCGPPGSGKTMTLFSALRALPDMEVVGLNFSSATTPELLLKTFDHYCEYRRTPNGVVLAPVQLGKWLVLFCDEINLPDMDKYGTQRVISFIRQMVEHGGFYRTSDQTWVKLERIQFVGACNPPTDPGRKPLSHRFLRHVPVVYVDYPGPASLTQIYGTFNRAMLRLIPSLRTYAEPLTAAMVEFYTMSQERFTQDTQPHYIYSPREMTRWVRGIFEALRPLETLPVEGLIRIWAHEALRLFQDRLVEDEERRWTDENIDMVALKHFPNIDKEKAMSRPILYSNWLSKDYIPVDQEELRDYVKARLKVFYEEELDVPLVLFNEVLDHVLRIDRIFRQPQGHLLLIGVSGAGKTTLSRFVAWMNGLSVYQIKVHRKYTGEDFDEDLRTVLRRSGCKNEKIAFIMDESNVLDSGFLERMNTLLANGEVPGLFEGDEYATLMTQCKEGAQKEGLMLDSHEELYKWFTSQVIRNLHVVFTMNPSSEGLKDRAATSPALFNRCVLNWFGDWSTEALYQVGKEFTSKMDLEKPNYIVPDYMPVVYDKLPQPPTHREAIVNSCVFVHQTLHQANARLAKRGGRTMAITPRHYLDFINHYANLFHEKRSELEEQQMHLNVGLRKIKETVDQVEELRRALRIKSQELEVKNAAANDKLKKMVKDQQEAEKKKVMSQEIQEQLHKQQEVIADKQMSVKEDLDKVEPAVIEAQNAVKSIKKQHLVEVRSMANPPAAVKLALESICLLLGESTTDWKQIRSIIMRENFIPTIVNFSAEEISDAIREKMKKNYMSNPSYNYEIVNRASLACGPMVKWAIAQLNYADMLKRVEPLRNELQKLEDDAKDNQQKANEVEQMIRDLEASIARYKEEYAVLISEAQAIKADLAAVEAKVNRSTALLKSLSAERERWEKTSETFKNQMSTIAGDCLLSAAFIAYAGYFDQQMRQNLFTTWSHHLQQANIQFRTDIARTEYLSNADERLRWQASSLPADDLCTENAIMLKRFNRYPLIIDPSGQATEFIMNEYKDRKITRTSFLDDAFRKNLESALRFGNPLLVQDVESYDPVLNPVLNREVRRTGGRVLITLGDQDIDLSPSFVIFLSTRDPTVEFPPDLCSRVTFVNFTVTRSSLQSQCLNEVLKAERPDVDEKRSDLLKLQGEFQLRLRQLEKSLLQALNEVKGRILDDDTIITTLENLKREAAEVTRKVEETDIVMQEVETVSQQYLPLSTACSSIYFTMESLKQVHFLYQYSLQFFLDIYHNVLYENPNLKGATDHTQRLSVITKDLFQVAFNRVARGMLHQDHITFAMLLARIKLKGTMGEPTYDAEFQHFLRGKEIVLSAGSTPKVQGLTVEQAEAVARLSCLPAFKDLIAKVQADEQFGIWLESSSPEQTVPYLWTEETPATPIGQAIHRLLLIQAFRPDRLLAMAHMFVSTNLGESFMSIMEQPLDLTHIVGTEVKPNTPVLMCSVPGYDASGHVEDLAAEQNTQITSIAIGSAEGFNQADKAINTAVKSGRWVMLKNVHLAPGWLMQLEKKLHSLQPHACFRLFLTMEINPRVPVNLLRAGRIFVFEPPPGVKANMLRTFSSIPVSRMCKSPNERARLYFLLAWFHAVIQERLRYAPLGWSKKYEFGESDLRSACDTVDTWLDDTAKGRQNISPDKIPWSALKTLMAQSIYGGRVDNEFDQRLLNTFLERLFTTRSFDSEFKLACKVDGHKDIQMPDGIRREEFVQWVELLPDAQTPSWLGLPNNAERVLLTTQGVDMISKMLKMQMLEDEDDLAYAETEKKTRTDFTSDGRPAWMRTLHTTASNWLHLIPQTLSPLKRTVENIKDPLFRFFEREVKMGAKLLQDVRQDLADVVQVCEGKKKQTNYLRTLINELVKGILPRSWSHYTVPAGMTVIQWVSDFSERIKQLQNISQAAAAGGAKELKNIHVCLGALFVPEAYITATRQYVAQANSWSLEELCLEVNVTASQSTTLDACSFGVTGLKLQGATCSNNKLSLSNAISTVLPLTQLRWGKQTSAEKKASVVTLPVYLNFTRADLIFTVDFEIATKEDPRSFYERGVAVLCTE

SEQ ID NO: 384 - protein, 85 aa, rat; identical to SEQ ID NO: 333

SEQ ID NO: 385 - protein, 824 aa, rat
MEGPRSDVGRWGRSPWQPTTPSPEPEPEPEPDRSSRSRRGGGRSFWARCCGCCSCGNRADDDWGPEPSGSRSRGTSSRGGGSRGGDSRGRDSRGGRRPESRGSGVNAAGDGTIREGMLVVNGVDLLCSRSDQNRREHHTDEFEYDELILRRGQPFHIILFLNREYESSDRIALELLIGNNPEVGKGTHVIIPVGKGGSGGWKAQVTKTNGHNLTLRVHTSPNAIIGKFQFTVRTRSEAGEFQLPFDPRNEIYILFNPWCPEDIVYVDHEDWRQEYVLNESGRIYYGTEAQIGERTWNYGQFDHGVLDACLYILDRRGMPYGGRGDPVSVSRVVSAMVNSLDDNGVLIGNWTGDYSRGTNPSAWVGSVEILLSYLRTGYSVPYGQCWVFAGVTTTVLRCLGLATRTVTNFNSAHDTDTSLTMDIYFDENMKPLEHLNHDSVWNFHVWNDCWMKRPDLPSGFDGWQVVDATPQETSSGIFCCGPCSVESIKNGLVYMKYDTPFIFAEVNSDKVYWQRQDDGSFKIVYVEEKAIGTLIVTKAINSNMREDITHIYKHPEGSEAERKAVEKAAAHGSKPNVYATRDSAEDVAMQVEAQDAVMGQDLTVSVVLTNRGSSRRTVKLHLYLCVTYYTGVSGPTFKETKKEVVLAPGASDTVAMPVAYKEYKPHLVDQGAMLLNVSGHVKESGQVLAKQHTFRLRTPDLSLTLLGAAVVGQECEVQIVFKNPLPITLTNVVFRLEGSGLQRPKVLNVGDIGGNETVTLRQTFVPVRPGPRQLIASLDSPQLSQVHGVIQVDVAPSSGGRGFSEAVGDSRSGENIPMAFRGGA

SEQ ID NO: 386 - protein, 283 aa, rat
MCSTPTYCDLGKAAKDVFNKGYGFGMVKIDLKTKSCSGVEFSTSGHAYTDTGKASGNLETKYKVCNYGLIFTQKWNTDNTLGTEISWENKLAEGLKLTVDTIFVPNTGKKSGKLKASYRRDCFSVGSKVDIDFSGPTIYGWAVLAFEGWLAGYQMSFDTAKSKLCQNNFALGYKAEDFQLHTHVNDGTEFGGSIYQRVNEKIETSINLAWTAGSNNTRFGIAAKYRLDCRTSLSAKVNNASLIGLGYTQSLRPGVKLTLSALVDGKNFNAGGHKVGLGFELEA

SEQ ID NO: 387 - protein, 625 aa, rat
SSASEGPGPQREAARDSSEQAQSRRTETISRGRSGHSTGRAHEDRHEQATDRSAGSGSRGGQAGSHSESEASGGQAGRRGTAATRHTSRPEQSPDTAGRTGSSRGQQSAQRHGDSTPGSTRTGSRGRGESPAGQQSPDRARHIESRRGRTREASASQSSDSEGHSGAHAGIGQGQTSTIHRRAGSSSGSQRASAGGQAADTSSRSGASQGQASGQGRAGSRSREAQGIARHGQSTDSHRHSGAGQAQAHTATSIDSRRPRGSSESQASDSEGHSDYSEAHTQGAHGGIQTSQRHEQRPSRGQQGSGHPQVYYYGVEETEDESDAQQGHQQQQQQQRQQQRQRQQHEQEREHEQQQPESSQRQQGSSGRTQRAARHEQDSDSTRQRGSHQAHSSARTQEEIARGRSGATASEGPGPQREAARDSSEHAQSRRTETSSRGRSGHSTGRAHEDRHQQATDRSARSGSRGGQAGSHSESEASGGQAGRRGTAATRHTSRPEQSPDTAGRTGSSRGQQSAQRHGDSTPGSTRTGSRGRGESPAGQQSPDRARHIESRRGRTREASASQSSDSEGHSGAHAGIGQGQTSTTHRRAGSSSGSQQASVEGSDGYDSVVKSKYLSFSQSYCYYY

SEQ ID NO: 388 - protein, 182 aa, rat
KAKKAITDAAMMAEELKKEQDTSAHLERMKKNMEQTVKDLQHRLDEAEQLALKGGKKQIQKLEARVRELENEVENEQKRNIEAVKGLRKHERRVKELTYQTEEDRKNVLRLQDLVDKLQTKVKAYKRQAEEAEEQSNVNLAKFRKIQHELEEAEERADIAESQVNKLRVKSREVHTKVISEE

SEQ ID NO: 389 - protein, 1161 aa, rat
MLRRVAVAAVFATGRKLRCEAGRDVTAVGRIEARGLCEESAKPFPTLTMPGRNKAKSTCSCPDLQPNGQDLGESGRVARLGADESEEEGRSLSNVGDPEIIKSPSDPKQYRYIKLQNGLQALLISDLSNVEGKTGNATDEEEEEEEEEEEGEEEEEEEEDDDDDDDEDSGAEIQDDDEEGFDDEEEFDDDEHDDDDLDNEENELEELEERVEARKKTTEKQSAAALCVGVGSFADPDDLPGLAHFLEHMVFMGSLKYPDENGFDAFLKKHGGSDNASTDCERTVFQFDVQRKYFKEALDRWAQFFIHPLMIRDAIDREVEAVDSEYQLARPSDANRKEMLFGSLARPGHPMGKFFWGNAETLKHEPKKNNIDTHARLREFWMRYYSAHYMTLVVQSKETLDTLEKWVTEIFSQIPNNGLPKPNFSHLTDPFDTPAFNKLYRVVPIRKIHALTITWALPPQQQHYRVKPLHYISWLVGHEGKGSILSYLRKKCWALALFGGNGETGFEQNSTYSVFSISITLTDEGYEHFYEVAHTVFQYLKMLQKLGPEKRVFEEIQKIEDNEFHYQEQTDPVEYVENMCENMQLYPRQDFLTGDQLLFEYKPEVIAEALNQLVPQKANLVLLSGANEGRCDLKEKWFGTQYSIEDIENSWTELWKSNFDLNSDLHLPAENKYIATDFTLKAFDCPETEYPAKIVNTPQGCLWYKKDNKFKIPKAYIRFHLISPLIQKSAANVVLFDIFVNILTHNLAEPAYEADVAQLEYKLVAGEHGLIIRVKGFNHKLPLLFQLIIDYLTEFSSTPAVFTMITEQLKKTYFNILIKPETLAKDVRLLILEYSRWSMIDKYRALMDGLSLESLLNFVKDFKSQLFVEGLVQGNVTSTESMDFLRYVVDKLNFVPLEREMPVQFQVVELPSGHHLCKVRALNKGDANSEVTVYYQSGTRSLREYTLMELLVMHMEEPCFDFLRTKQTLGYHVYPTCRNTSGILGFSVTVGTQATKYNSETVDKKIEEFLSSFEEKIENLTEDAFNTQVTALIKLKECEDTHLGEEVDRNWNEVVTQQYLFDRLAHEIEALKSFSKSDLVSWFKAHRGPGSKMLSVHVVGYGKYELEEDGAPVCEDPNSREGMQLIYLPPSPLLAESTTPITDIRAFTATLSLFPYHKIVK

SEQ ID NO: 390 - protein, 568 aa, rat
MSHQHTVPVTVPAVVQESLKTVCSPAQTQQEQTKQPTPYPAQCQVFTDTQEKGFPKHEEKEANPVKDLPEQESEHHQQPGPQKQQLQVKKPEQELQEQELHSEKQPQEPQGLLCLGQQQQREPQEQEQHLRQHQQPQQESQGQGLCLGQQQDVLAPQELHMGQHQKEKLQEPELPLGQQQKTPEEQELILGEKQQKLHLVERHQEPQEQELHHGQKQKQQQPQEQELQLVQHQKQKQHEPELCLRKQQQQESHERELHLGKQQQQESHEPELHLGKQQHQESHEPELHLGKQQHQESCEPELHLGEQQHQEQQQHQESCEPELHLGKQQHQETQESELQLGKQQKPHEPDMVLDPKEKQKLHDPELHLGKQQHQESQESELQVEKKQHEKSPEPELHLGKQQELHEPDMTEDQKEKQSLHEPELHLGKQQESHEPDMTEDQKEKQSLYEPELHLGKQQEQQIEYEGYQRSKSLNQLLKQEKASRGQELDDSHLEQEKELLDQRLDQELVNKDEQLERKKHKLENLTQKEKQIKQLVPSTDRVQETQPIQPVKEDSLTTKKQQHSHEVQ

SEQ ID NO: 391 - protein, 381 aa, rat
MPFGNTHNKFKLNYKSQEEYPDLSKHNNHMAKVLTPDLYNKLRDKETPSGFTLDDVIQTGVDNPGHPFIMTVGCVAGDEESYTVFKDLFDPIIQDRHGGFKPTDKHKTDLNHENLKGGDDLDPNYVLSSRVRTGRSIKGYTLPPHCSRGERRAVEKLSVEALNSLTGEFKGKYYPLKSMTEQEQQQLIDDHFLFDKPVSPLLLASGMARDWPDARGIWHNDNKSFLVWVNEEDHLRVISMEKGGNMKEVFRRFCVGLQKIEEIFKKAGHPFMWNEHLGYVLTCPSNLGTGLRGGVHVKLANLSKHPKFEEILTRLRLQKRGTGGVDTAAVGAVFDISNADRLGSSEVEQVQLVVDGVKLMVEMEKKLEKGQSIDDMIPAQK

SEQ ID NO: 392 - protein, 589 aa, rat
MATTVTCTRFTDEYQLYEDIGKGAFSVVRRCVKLCTGHEYAAKIINTKKLSARDHQKLEREARICRLLKHSNIVRLHDSISEEGFHYLVFDLVTGGELFEDIVAREYYSEADASHCIQQILEAVLHCHQMGVVHRDLKPENLLLASKCKGAAVKLADFGLAIEVQGDQQAWFGFAGTPGYLSPEVLRKEAYGKPVDIWACGVILYILLVGYPPFWDEDQHKLYQQIKAGAYDFPSPEWDTVTPEAKNLINQMLTINPAKRITAHEALKHPWVCQRSTVASMMHRQETVECLKKFNARRKLKGAILTTMLATRNFSAAKSLLNKKADGVKPQTNSTKNSSAITSPKGSLPPAALESSDSTNTTIEDEDAKAPRISDILNSVRRGCGTPEAEGPLSVGPPPCLSPGLLGPLPTPSPRISDILNSVRRGSGTPEAEGLPPVGPPPCPSPTLPGPLPTPSRKQEIIKTTEQLIEAVNNGDFEAYAKICDPGLTSFEPEALGNLVEGMDFHRFYFENLLAKNSKPIHTTILNPHVHVIGEDAACIAYIRLTQYIDGQGRPRTSQSEETRVWHRPDGKWQNVHFHCSGAPVAPLQ

SEQ ID NO: 393 - protein, 461 aa, rat
MGLPIVPGLLLSLVLLALLMGIHPSGVTGLVPSLGDREKRDNLCPQGKYAHPKNNSICCTKCHKGTYLVSDCPSPGQETVCEVCDKGTFTASQNHVRQCLSCKTCRKEMFQVEISPCKADMDTVCGCKKNQFQRYLSETHFQCVDCSPCFNGTVTIPCKEKQNTVCNCHAGFFLSGNECTPCSHCKKNQECMKLCLPPVANVTNPQDSGTAVLLPLVIFLGLCLLFFICISLLCRYPQWRPRVYSIICRDSAPVKEVEGEGIVTKPLTPASIPAFSPNPGFNPTLGFSTTPRFSHPVSSTPISPVFGPSNWHNFVPPVREVVPTQGADPLLYGSLNPVPIPAPVRKWEDVVAAQPQRLDTADPAMLYAVVDGVPPTRWKEFMRLLGLSEHEIERLELQNGRCLREAHYSMLEAWRRRTPRHEATLDVVGRVLCDMNLRGCLENIRETLESPAHSSTTHLPR

SEQ ID NO: 394 - protein, 673 aa, rat
MAPFLRISFNSYELGSLQAEDDASQPFCAVKMKEALTTDRGKTLVQKKPTMYPEWKSTFDAHIYEGRVIQIVLMRAAEDPMSEVTVGVSVLAERCKKNNGKAEFWLDLQPQAKVLMCVQYFLEDGDCKQSMRSEEEAMFPTMNRRGAIKQAKIHYIKNHEFIATFFGQPTFCSVCKEFVWGLNKQGYKCRQCNAAIHKKCIDKIIGRCTGTATNSRDTIFQKERFNIDMPHRFKVYNYMSPTFCDHCGTLLWGLVKQGLKCEDCGMNVHHKCREKVANLCGINQKLLAEALNQVTQKASRKPETPETVGIYQGFEKKTAVSGNDIPDNNGTYGKIWEGSNRCRLENFTFQKVLGKGSFGKVLLAELKGKERYFAIKYLKKDVVLIDDDVECTMVEKRVLALAWENPFLTHLICTFQTKDHLFFVMEFLNGGDLMFHIQDKGRFELYRATFYAAEIICGLQFLHGKGIIYRDLKLDNVMLDKDGHIKIADFGMCKENIFGENRASTFCGTPDYIAPEILQGLKYSFSVDWWSFGVLLYEMLIGQSPFHGDDEDELFESIRVDTPHYPRWITKESKDIMEKLFERDPAKRLGVTGNIRLHPFFKTINWNLLEKRKVEPPFKPKVKSPSDYSNFDPEFLNEKPQLSFSDKNLIDSMDQTAFKGFSFVNPKYEQFLE

SEQ ID NO: 395 - protein, 463 aa, rat
MGKEKTHINIVVIGHVDSGKSTTTGHLIYKCGGIDKRTIEKFEKEAAEMGKGSFKYAWVLDKLKAERERGITIDISLWKFETTKYYITIIDAPGHRDFIKNMITGTSQADCAVLIVAAGVGEFEAGISKNGQTREHALLAYTLGVKQLIVGVNKMDSTEPAYSEKRYDEIVKEVSAYIKKIGYNPATVPFVPISGWHGDNMLEPSPNMPWFKGWKVERKEGNASGVSLLEALDTILPPTRPTDKPLRLPLQDVYKIGGIGTVPVGRVETGILRPGMVVTFAPVNITTEVKSVEMHHEALSEALPGDNVGFNVKNVSVKDIRRGNVCGDSKADPPQEAAQFTSQVIILNHPGQISAGYSPVIDCHTAHIACKFAELKEKIDRRSGKKLEDNPKSLKSGDAAIVEMVPGKPMCVESFSQYPPLGRFAVRDMRQTVAVGVIKNVEKKSGGAGKVTKSAQKAQKAGK

SEQ ID NO: 396 - protein, 500 aa, rat
SSPAQPAVPAPLANLKIQHTKIFINNEWHNSLNGKKFPVINPATEEVICHVEEGDKADVDKAVKAARQAFQIGSPWRTMDASERGCLLNKLADLMERDRVLLATMESMNAGKIFTHAYLLDTEVSIKALKYFAGWADKIHGQTIPSDGDVFTYTRREPIGVCGQIIPWNGPLILFIWKIGAALSCGNTVIVKPAEQTPLTALYMASLIKEAGFPPGVVNVVPGYGSTAGAAISSHMDIDKVSFTGSTEVGKLIKEAAGKSNLKRVTLELGGKSPCIVFADADLDSAVEFAHQGVFFHQGQICVAASRLFVEESIYDEFVRRSVERAKKYVLGNPLDSGISQGPQIDKEQHAKILDLIESGKKEGAKLECGGGRWGNKGFFVQPTVFSNVTDEMRIAKEEIFGPVQQIMKFKSIDEVIKRANNTPYGLAAGVFTKDLDRAITVSSALQAGTVWVNCYLTLSVQCPFGGFKMSGNGREMGEQGVYEYTELKTVAMKISQKNS

SEQ ID NO: 397 - protein, 181 aa, rat
MKLLLLLLCLGLTLVCGHAEEASSTRGNLDVAKLNGDWFSIVVASNKREKIEENGSMRVFMQHIDVLENSLGFKFRIKENGECRELYLVAYKTPEDGEYFVEYDGGNTFTILKTDYDRYVMFHLINFKNGETFQLMVLYGRTKDLSSDIKEKFAKLCEAHGITRDNIIDLTKTDRCLQARG

SEQ ID NO: 398 - protein, 381 aa, rat
MRAVPLHLVGTASLTLGFLLLLSLRLDPGQAKELKFVTLVFRHGDRGPIETFPNDPIKESSWPQGFGQLTKWGMGQHYELGSYIRRRYGRFLNNSYKHDQVYIRSTDVDRTLMSAMTNLAALFPPEGISIWNPRLLWQPIPVHTVSLSEDRLLYLPFRDCPRFQELKSETLKSEEFLKRLQPYKSFIDTLPSLSGFEDQDLFEIWSRLYDPLYCESVHNFTFRTWATEDAMTKLKELSELSLLSLYGIHKQKEKSRLQGGVLVNEILKNMKLATQPQKARKLIMYSAYDTTVSGLQMALELYNGLLPPYASCHIMELYQDNGGTFVEMYYRNETQNEPYPLTLPGCTHSCPLEKFAELLDPVIPQDWATECMGTSNHQASL

SEQ ID NO: 399 - protein, 747 aa, rat; identical to SEQ ID NO: 315

SEQ ID NO: 400 - protein, 747 aa, rat; identical to SEQ ID NO: 315

SEQ ID NO: 401 - protein, 175 aa, rat
MDIAIHHPWIRRPFFPFHSPSRLFDQFFGEHLLESDLFSTATSLSPFYLRPPSFLRAPSWIDTGLSEMRMEKDRFSVNLDVKHFSPEELKVKVLGDVIEVHGKHEERQDEHGFISREFHRKYRIPADVDPLTITSSLSSDGVLTVNGPRKQASGPERTIPITREEKPAVTAAPKK

SEQ ID NO: 402 - protein, 589 aa, rat; identical to SEQ ID NO: 392

SEQ ID NO: 403 - protein, 1938 aa, rat
MTDAQMADFGAARYLRKSEKERLEAQTRPFDIRTECFVPDDKEEYVKAKIVSREGGKVTAETENGKTVTVKEDQVMQQNPPKFDKIEDMAMLTFLHEPAVLYNLKERYAAWMIYTYSGLFCVTVNPYKWLPVYNAEVVAAYRGKKRSEAPPHIFSISDNAYQYMLTDRENQSILITGESGAGKTVNTKRVIQYFASIAAIGDRSKKDNPNANKGTLEDQIIQANPALEAFGNAKTVRNDNSSRFGKFIRIHFGATGKLASADIETYLLEKSRVIFQLKAERNYHIFYQILSNKKPELLDMLLVTNNPYDYAFVSQGEVSVASIDDSEELLATDSAFDVLGFTAEEKAGVYKLTGAIMHYGNMKFKQKQREEQAEPDGTEDADKSAYLMGLNSADLLKGLCHPRVKVGNEYVTKGQSVQQVYYSIGALAKSVYEKMFNWMVTRINATLETKQPRQYFIGVLDIAGFEIFDFNSFEQLCINFTNEKLQQFFNHHMFVLEQEEYKKEGIEWEFIDFGMDLQACIDLIEKPMGIMSILEEECMFPKATDMTFKAKLYDNHLGKSNNFQKPRNVKGKQEAHFSLVHYAGTVDYNILGWLEKNKDPLNETVVGLYQKSSLKLMATLFSTYASADTGDSGKGKGGKKKGSSFQTVSALHRENLNKLMTNLRTTHPHFVRCIIPNERKAPGVMDNPLVMHQLRCNGVLEGIRICRKGFPNRILYGDFRQRYRILNPAAIPEGQFIDSGKGAEKLLGSLDIDHNQYKFGHTKVFFKAGLLGLLEEMRDERLSRIITRIQAQARGQLMRIEFKKMVERRDALLVIQWNIRAFMGVKNWPWMKLYFKIKPLLKSAETEKEMANMKEEFGRVKDALEKSEARRKELEEKMVSLLQEKNDLQLQVQAEQDNLADAEERCDQLIKNKIQLEAKVKEMTERLEDEEEMNAELTAKKRKLEDECSELKKDIDDLELTLAKVEKEKHATENKVKNLTEEMAGLDEIIAKLTKEKKALQEAHQQALDDLQAEEDKVNTLTKSKVKLEQQVDDLEGSLEQEKKVRMDLERAKRKLEGDLKLTQESIMDLENDKLQLEEKLKKKEFDISQQNSKIEDEQALALQLQKKLKENQARIEELEEELEAERTARAKVEKLRSDLTRELEEISERLEEAGGATSVQIEMNKKREAEFQKMRRDLEEATLQHEATAAALRKKHADSVAELGEQIDNLQRVKQKLEKEKSEFKLELDDVTSHMEQIIKAKANLEKVSRTLEDQANEYRVKLEEAQRSLNDFTTQRAKLQTENGELARQLEEKEALIWQLTRGKLSYTQQMEDLKRQLEEEGKAKNALAHALQSARHDCDLLREQYEEEMEAKAELQRVLSKANSEVAQWRTKYETDAIQRTEELEEAKKKLAQRLQDAEEAVEAVNAKCSSLEKTKHRLQNEIEDLMVDVERSNAAAAALDKKQRNFDKILAEWKQKYEESQSELESSQKEARSLSTELFKLKNAYEESLEHLETFKRENKNLQEEISDLTEQLGEGGKNVHELEKIRKQLEVEKLELQSALEEAEASLEHEEGKILRAQLEFNQIKAEIERKLAEKDEEMEQAKRNHLRVVDSLQTSLDAETRSRNEALRVKKKMEGDLNEMEIQLSQANRIASEAQKHLKNAQAHLKDTQLQLDDAVRANDDLKENIAIVERRNTLLQAELEELRAVVEQTERSRKLAEQELIETSERVQLLHSQNTSLINQKKKMDADLSQLQTEVEEAVQECRNAEEKAKKAITDAAMMAEELKKEQDTSAHLERMKKNMEQTIKDLQHRLDEAEQIALKGGKKQLQKLEARVRELENELEAEQKRNAESVKGMRKSERRIKELTYQTEEDKKNLVRLQDLVDKLQLKVKAYKRQAEEAEEQANTNLSKFRKVQHELDEAEERADIAESQVNKLRAKSRDIGAKQKMHDEE

SEQ ID NO: 404 - protein, 439 aa, rat
MASLTVKAYLLGKEEAAREIRRFSFCFSPEPEAEAAAGPGPCERLLSRVAVLFPALRPGGFQAHYRDEDGDLVAFSSDEELTMAMSYVKDDIFRIYIKEKKECRREHRPPCAQEARSMVHPNVICDGCNGPVVGTRYKCSVCPDYDLCSVCEGKGLHREHSKLIFPNPFGHLSDSFSHSRWLRKLKHGHFGWPGWEMGPPGNWSPRPPRAGDGRPCPTAESASAPSEDPNVNFLKNVGESVAAALSPLGIEVDIDVEHGGKRSRLTPTSAESSSTGTEDKSGTQPSSCSSEVSKPDGAGEGPAQSLTEQMKKIALESVGQPEELMESDNCSGGDDDWTHLSSKEVDPSTGELQSLQMPESEGPSSLDPSQEGPTGLKEAALYPHLPPEADPRLIESLSQMLSMGFSDEGGWLTRLLQTKNYDIGAALDTIQYSKHPPPL

SEQ ID NO: 405 - protein, 353 aa, rat
MNGDQKLDVHNQEKQNFIQHFSQIVKVLTEDELGHPEKGDAITRIKEVLEYNTVGGKYNRGLTVVQTFQELVEPRKQDAESLQRALTVGWCVELLQAFFLVLDDIMDSSYTRRGQICWYQKPGIGLDAINDALLLEAAIYRLLKFYCREQPYYLNLLELFLQSSYQTEIGQTLDLITAPQGQVDLGRYTEKRYKSIVKYKTAFYSFYLPIAAAMYMAGIDGEKEHANALKILLEMGEFFQIQDDYLDLFGDPSVTGKVGTDIQDNKCSWLVVQCLLRATPQQRQILEENYGQKDPEKVARVKALYEELDLRSVFFKYEEDSYNRLKSLIEQCSAPLPPSIFLELANKIYKRRK

SEQ ID NO: 406 - protein, 887 aa, rat
MAADDTEAPVLSEDEVWEFCLDKNEEGGGSPGSDVTDTCEPPCGCWELNPSSLEEEHVLFTAESIISSFNNDDTRVVRVKVIAGIGLAKKDILGASDPYVRVTLYDPMSGVLTSVQTKTIKKSLNPKWNEEILFRVLPQQHRILFEVFDENRLTRDDFLGQVDVPLYPLPTENPRMERPYTFKDFVLHPRSHKSRVKGYLRLKMTYLPKNGSDDENADQAEELEPGWVVLDQPDAATHLQHPPEPSPLPPGWEERQDVLGRTYYVNHESRTTQWKRPSPEDDLTDDENGDIQLQAHGAFTTRRQISEDVDGPDNHESPENWEIVREDENTIYSGQAVQSPPSGHPDVQVRLAEELDTRLTMYGNPATSQPVTSSNHSSRGGSSQTCIFEEQPTLPVLLPTSSGLPPGWEEKQDDRGRSYYVDHNSKTTTWSKPTMQDDPRSKIPAHLRGKTPVDSNDLGPLPPGWEERTHTDGRVFFINHNIKKTQWEDPRMQNVAITGPAEPYSRDYKRKYEFFRRKLKKQTDIPNKFEMKLRRANILEDSYRRIMGVKRADFLKARLWIEFDGEKGLDYGGVAREWFFLISKEMFNPYYGLFEYSATEDNYTLQINPNSGLCNEDHLSYFKFIGRVAGMAVYHGKLLDGFFIRPFYKMMLQKLITLHDMESVDSEYYSSLRWILENDPTELDLRFIIDEELFGQTHQHELKTGGSEVVVTNKNKKEYIYLVIQWRFVNRIQKQMAAFKEGFFELIPQDLIKIFDENELELLMCGLGDVDVNDWREHTKYKNGYSLNHQVIHWFWKAVLMMDSEKRIRLLQFVTGTSRVPMNGFAELYGSNGPQSFTVEQWGTPDKLPRAHTCFNRLDLPPYESFDELWDKLQMAIENTQGFDGVD

SEQ ID NO: 407 - protein, 385 aa, rat
MWRSLGLALALCLLPYGGAESQGQSPACKQAPPWNIGDQNPMLNSEGTVTVVALLQASCYLCLLQASRLEDLRIKLENQGYFNISYIVVNHQGSPSQLKHAHLKKQVSDHIAVYRQDEHQTDVWTLLNGNKDDFLIYDRCGRLVYHLGLPYSFLTFPYVEEAIKIAYCEKRCGNCSFTSLEDEAFCKNVSSATASKTTEPSEEHNHHKHHDKHGHEHLGSSKPSENQQPGALDVETSLPPSGLHHHHHHHKHKGQHRQGHLESCDMGASEGLQLSLAQRKLCRRGCINQLLCKLSEESGAATSSCCCHCRHLIFEKSGSAITCQCAENLPSLCSCQGLFAEEKVIESCQCRSPPAACHSQHVSPTEASPNCSCNNKTKKCKCNLN

SEQ ID NO: 408 - protein, 295 aa, rat
MEHQLLCCEVETIRRAYPDTNLLNDRVLRAMLKTEETCAPSVSYFKCVQREIVPSMRKIVATWMLEVCEEQKCEEEVFPLAMNYLDRFLSLEPLKKSRLQLLGATCMFVASKMKETIPLTAEKLCIYTDNSIRPEELLQMELLLVNKLKWNLAAMTPHDFIEHFLSKMPEADENKQIIRKHAQTFVALCATDVKFISNPPSMVAAGSVVAAMQGLNLGSPNNFLSCYRTTHFLSRVIKCDPDCLRACQEQIEALLESSLRQAQQNIDPKATEEEGEVEEEAGLACTPTDVRDVDI

SEQ ID NO: 409 - protein, 70 aa, rat
MSASLVRATVRAVSKRKLQPTRAALTLTPSAVNKIKQLLKDKPEHVGLKVGVRTRGCNGLSYSLEYTKTK

SEQ ID NO: 410 - protein, 195 aa, rat
MSGASRGLFWAATCLAALCLSAAQSNSSASPNVTDPPTTTSKVVPTTLTTTKPPETCESFNSCVSCVNATLTNNITCVWLDCHEANKTYCSSELVSNCTQKTSTDSCSVIPTTPVPTNSTAKPTTRPSSPTPTPSVVTSAGATNTTVTPTSQPERKSTFDAASFIGGIVLVLGVQAVIFFLYKFCKSKERNYHTL

SEQ ID NO: 411 - protein, 85 aa, rat; identical to SEQ ID NO: 333

SEQ ID NO: 412 - protein, 687 aa, rat
MTEITAEGNASITTTVIDNKNGSVPKSPGKVLKRTVTEDIVTTFSSPAAWLLVIALIITWSAVAIVMFDLVDYKNFSASSIAKIGSDPLKLVNDAVEETTDWIYGFFSLLSDIISSDGDEDDEDADEDIDKGEIEEPPLKRKEIQKEKAEKQEKPEKKIQTKVSHREKEKGKEKLKGEKPEKKATHKEKLEKKERTETKMAAKEDKKIKTKEKTEEKAKKEMKVGKQEKAKPAAAKAKETPKTTPKAREKDDKETPAVPKHEQKDQYAFCRYMIDMFVHGDLKPGQSPAVPPPSLTASRPALSTPSLEEKEKEEKKKVEKKVTSDTKKKEKGEAKKKSEKETVIDGKGKEPGKPPETKQTTTKLTTQAAATKDEKKEDSKKMKKPPEEKPKGKKQEKKEKHIEPAKTPKKEHPAPSEKHRKAKAEQAKEEIAPASTKKALHGKKEEKAKTVEQGKDVKPKLPQPQLKKEEKSEPQPKKEVKLETQLKKEEKSEPQVKKEAKLASSEKGQTRKQNITRPEQVIPHGKPEQKVPKQIKAITAEKTEKAERQEKYHPSIKTEGKPEVTDSGKKKIEKPEKESKVPPKQENLQVRNVTRAEKRGKISKDSKDAPAPKKDKDSKDVLHSKKDKEVTNNVSSPKKQKSPISFFQCVYLDGYNGYGFQFPVTPVQHSGENPGKSNSPGQKQQEQ

SEQ ID NO: 413 - protein, 82 aa, rat
MSEAGTPEAPIKKKRPPVKEEDLKGARGSLSKNQEIKSKTYQVMRDYEQAGSAAPSIFSRNRTGTETVFEKPKEGPAKSVFG

SEQ ID NO: 414 - protein, 508 aa, rat
MEDSSRVSPSKGTSNITKLNGMVLLCKVCGDVASGFHYGVHACEGCKGFFRRSIQQNIQYKRCLKNENCSIVRINRNRCQQCRFKKCLSVGMSRDAVRFGRIPKREKQRMLAEMQNAMNLANNQLSSLCPLETSPAPHPTSGSVGPSPPPAPAPTPLVGFSQFPQQLTPPRSPSPEPTVEDVISQVARAHREIFTYAHDKLGTSPGNFNANHASGSPPATTPQCWESQGCPSTPNDNNLLAAQRHNEALNGLRQGPSSYPPTWPSGPAHHSCHQPNSNGHRLCPTHVYSAPEGKAPANGLRQGNTKNVLLACPMNMYPHGRSGRTVQEIWEDFSMSFTPAVREVVEFAKQIPGFRDLSQHDQVTLLKAGTFEVLMVRFASLFNVKDQTVMFLSRTTYSLQELGAMGMGDLLNAMFDFSEKLNSLALTEEELGLFTAVVLVSAEGSGMENSASVEQLQETLLGALRALVLKNRPSETSRFTKLLLKLPDLRTLNNMHSEKLLSFRVDAQ

SEQ ID NO: 415 - protein, 1019 aa, rat
MRNGLVWLLHPALPSTLHSILGARPPPVKRLCGFPKQIYSTMNNPAIQRIEDHIVKSPEDKREYRGLELANGIKVLLISDPTTDKSSAALDVHIGSLSDPPNIPGLSHFCEHMLFLGTKKYPKENEYSQFLSEHAGSSNAFTSGEHTNYYFDVSHEHLEGALDRFAQFFLCPLFDASCKDREVNAVDSEHEKNVMNDAWRLFQLEKATGNPKHPFSKFGTGNKYTLETRPNQEGIDVREELLKFHSTYYSSNLMAICVLGRESLDDLTNLVVKLFSEVENKNVPLPEFPEHPFQEEHLKQLYKIVPIKDIRNLYVTFPIPDLQQYYKSNPGHYLGHLIGHEGPGSLLSELKSKGWVNTLVGGQKEGARGFMFFIINVDLTEEGLLHVEDIILHMFQYIQKLRAEGPQEWVFQECKDLNAVAFRFKDKERPRGYTSKIAGKLHYYPLNGVLTAEYLLEEFRPDLIDMVLDKLRPENVRVAIVSKSFEGKTDRTEQWYGTQYKQEAIPEDVIQKWQNADLNGKFKLPTKNEFIPTNFEILALEKDATPYPALIKDTAMSKLWFKQDDKFFLPKACLNFEFFSPFAYVDPLHCNMAYLYLELLKDSLNEYAYAAELAGLSYDLQNTIYGMYLSVKGYNDKQPILLKKITEKMATFEIDKKRFEIIKEAYMRSLNNFRAEQPHQHAMYYLRLLMTEVAWTKDELKEALDDVTLPRLKAFIPQLLSRLHIEALLHGNITKQAALGVMQMVEDTLIEHAHTKPLLPSQLVRYREVQLPDRGWFVYQRRNEVHNNCGIEIYYQTDMQSTSENMFLELFCQIISEPCFNTLRTKEQLGYIVFSGPRRANGIQGLRFIIQSEKPPHYLESRVEAFLITMEKAIEDMTEEAFQKHIQALAIRRLDKPKKLSAECAKYWGEIISQQYNYDRDNIEVAYLKTLSKDDIIKFYKEMLAVDAPRRHKVSVHVLAREMDSCPVVGEFPSQNDINLSEAPPLPQPEVIHNMTEFKRGLPLFPLVKPHINFMAAKL

SEQ ID NO: 416 - protein, 109 aa, rat
SMTDLLSAEDIKKAIGAFTAADSFDHKKFFQMVGLKKKSADDVKKVFHILDKDKSGFIEEDELGSILKGFSSDARDLSAKETKTLMAAGDKDGDGKIGVEEFSTLVAES

SEQ ID NO: 417 - protein, 1107 aa, rat
MGSKGAYRYHWQSHNVKHSGVDDMVLLSKITESSIVENLKKRYMDDYIFTYIGSVLISVNPFKQMPYFGEKEIEMYQGAAQYENPPHIYALADSMYRNMIIDRENQCVIISGESGAGKTVAAKYIMSYVSRVSGGGPKVQHVKDIILQSNPLLEAFGNAKTVRNNNSSRFGKYFEIQFSPGGEPDGGKISNFLLEKSRVVMRNPGERSFHIFYQLIEGASPEQKQSLGITSMDYYYYLSLSGSYKVDDIDDKRDFQETLHAMNVIGIFSEEQTLVLQIVAGILHLGNINFKEVGNYAAVESEEFLAFPAYLLGINQDRLKEKLTSRQMDSKWGGKSESIHVTLNVEQACYTRDALAKALHARVFDFLVDSINKAMEKDHEEYNIGVLDIYGFEIFQKNGFEQFCINFVNEKLQQIFIELTLKAEQEEYVQEGIRWTPIEYFNNKIVCDLIESKVNPPGIMSILDDVCATMHAVGEGADQTLLQKLQMQIGSHEHFNSWNQGFIIHHYAGKVSYDMDGFCERNRDVLFMDLIELMQSSELPFIKSLFPENLQADKKGRPTTAGSKIKKQANDLVSTLMKCTPHYIRCIKPNETKKPKDWEESRVKHQVEYLGLKENIRVRRAGYAYRRVFQKFLQRYAILTKATWPVWRGDEKQGVLHLLQSVNMDSDQFQLGRSKVFIKAPESLFLLEEMRERKYDGYARVIQKTWRKFVARKKYVQMREDASDLLLNKKERRRNSINRNFIGDYIGMEEHPELQQFVGKREKIDFADIVTKYDRRFKGVKRDLLLTPKCLYLIGREKVKQGPDKGLVKEVLKRKIEVERILSVSLSTMQDDIFILHEQEYDSLLESVFKTEFLSLLTKRYEEKTQKQLPLKFSNTLELKLKKENWGPWSAGGSRQVQFYQGFGDLAILKPSNKVLQVSIGPGLPKNARPTRRNTVSSRGYSGGTNNNYPMRAAPAPPGCHRNGLTRNQFVHPPRASGNQRSNQKSLYTSMARPPLPRQQSTGSDRLSQTPESLDFLKVPDQGAAGVRRQTTSRPPPAGGRPKPQPKPKPQVPQCKALYAYDAQDTDELSFNANDVIDIIKEDPSGWWTGRLRGKQGLFPNNYVTKI

SEQ ID NO: 418 - protein, 271 aa, rat
MVISVVLLLLAACAVPAQGLGSFVHCEPCDEKALSMCPPSPLGCELVKEPGCGCCMTCALAEGQSCGVYTERCAQGLRCLPRQDEEKPLHALLHGRGVCLNEKSYGEQTKIERDSREHEEPTTSEMAEETYSPKVFRPKHTRISELKAEAVKKDRRKKLTQSKFVGGAENTAHPRVIPAPEMRQESDQGPCRRHMEASLQEFKASPRMVPRAVYLPNCDRKGFYKRKQCKPSRGRKRGICWCVDKYGMKLPGMEYVDGDFQCHAFDSSNVE

SEQ ID NO: 419 - protein, 294 aa, rat
MIEVLTTDSQKLLHQLNTLLEQESRCQPKVCGLKLIESAHDNGLRMTARLRDFEVKDLLSLTQFFGFDTETFSLAVNLLDRFLSKMKVQAKHLGCVGLSCFYLAVKSIEEERNVPLATDLIRISQYRFTVSDLMRMEKIVLEKVCWKVKATTAFQFLQLYYSLIRETLPFERRNDLNFERLEAQLKACHCRIIFSKAKPSVLALAIIALEIQALKYVELTEGVECIQKHSKISGRDLTFWQELVSKCLTEYSSNKCSKPNGQKLKWIVSGRTARQLKHSYYRITHLPTIPETMG

SEQ ID NO: 420 - protein, 354 aa, rat
MKATLVLFLLAQVSWAGPFEQRGLFDFMLEDEASGIIPYDPDNPLISMCPYRCQCHLRVVQCSDLGLDKVPWEFPPDTTLLDLQNNKITEIKEGAFKNLKDLHTLILVNNKISKISPEAFKPLVKLERLYLSKNHLKELPEKLPKTLQELRLHDNEITKLKKSVFNGLNRMIVIELGGNPLKNSGIENGALQGMKGLGYIRISDTNITAIPQGLPTSISELHLDGNKIAKVDAASLKGMSNLSKLGLSFNSITVVENGSLANVPHLRELHLDNNKLLRVPAGLAQHKYVQVVYLHNNNISEVGQHDFCLPSYQTRKTSYTAVSLYSNPVRYWQIHPHTFRCVFGRSTIQLGNYK

SEQ ID NO: 421 - protein, 294 aa, rat; identical to SEQ ID NO: 419

SEQ ID NO: 422 - protein, 798 aa, rat
MSFDPNLLHNNGHNGYPNGTSAALRETGVIEKLLTSYGFIQCSERQARLFFHCSQYNGNLQDLKVGDDVEFEVSSDRRTGKPIAIKLVKIKPEIHPEERMNGQVVCAVPHNLESKSPAAPGQSPTGSVCYERNGEVFYLTYTSEDVEGNVQLETGDKINFVIDNNKHTGAVSARNIMLLKKKQARYQGVVCAMKEAFGFIERGDVVKEIFFHYSEFKGDLETLQPGDDVEFTIKDRNGKEVATDVRLLPQGTVIFEDISIEHFEGTVTKVIPKVPSKNQNDPLPGRIKVDFVIPKELPFGDKDTKSKVTLLEGDHVRFNISTDRRDKLERATNIEVLSNTFQFTNEAREMGVIAAMRDGFGFIKCVDRDARMFFHFSEILDGNQLHIADEVEFTVVPDMLSAQRNHAIRIKKLPKGTVSFHSHSDHRFLGTVEKEATFSNPKTTSPNKGKDKEAEDGIIAYDDCGVKLTIAFQAKDVEGSTSPQIGDKVEFSISDKQRPGQQIATCVRLLGRNSNSKRLLGYVATLKDNFGFIETANHDKEIFFHYSEFSGDVDSLELGDMVEYSLSKGKGNKVSAEKVNKTHSVNGITEEANPTIYSGKVIRPLRGVDPTQIEYQGMIEIVEEGDMKGEVYPFGIVGMANKGDCLQKGESVKFQLCVLGQNAQTMAYNITPLRRATVECVKDQFGFINYEVGDSKKLFFHVKEVQDGIELQAGDEVEFSVILNQRTGKCSACNVWRVCEGPKAVAAPRPDRLVNRLKNITLDDASAPRLMVLRQPRGPDNSMGFGAERKIRQAGVID

SEQ ID NO: 423 - protein, 165 aa, rat
MPPKFDPNEIKVVYLRCTGGEVGATSALAPKIGPLGLSPKKVGDDIAKATGDWKGLRITVKLTIQNRQAQIEVVPSASALIIKALKEPPRDRKKQKNIKHNGNITFDEIVNIARQMRHRSLARELSGTIKEILGTAQSVGCNVDGRHPHDIIDDINSGAVECPAS

SEQ ID NO: 424 - protein, 165 aa, rat; identical to SEQ ID NO: 423

SEQ ID NO: 425 - protein, 543 aa, rat
RRALPRRAGLVSKNALGSSFVGTRNLHASNTRLQKTGTAEMSSILEERILGADTSVDLEETGRVLSIGDGIARVHGLRNVQAEEMVEFSSGLKGMSLNLEPDNVGVVVFGNDKLIKEGDIVKRTGAIVDVPVGDELLGRVVDALGNAIDGKGPVGSKIRRRVGLKAPGIIPRISVREPMQTGIKAVDSLVPIGRGQRELIIGDRQTGKTSIAIDTIINQKRFNDGTDEKKKLYCIYVAIGQKRSTVAQLVKRLTDADAMKYTIVVSATASDAAPLQYLAPYSGCSMGEYFRDNGKHALIIYDDLSKQAVAYRQMSLLLRRPPGREAYPGDVFYLHSRLLERAAKMNDSFGGGSLTALPVIETQAGDVSAYIPTNVISITDGQIFLETELFYKGIRPAINVGLSVSRVGSAAQTRAMKQVAGTMKLELAQYREVAAFAQFGSDLDAATQQLLSRGVRLTELLKQGQYSPMAIEEQVAVIYAGVRGYLDKLEPSKITKFESAFLSHVVSQHQSLLGNIRSDGKISEQSDAKLKEIVTNFLAGFEP

SEQ ID NO: 426 - protein, 175 aa, rat; identical to SEQ ID NO: 401

SEQ ID NO: 427 - protein, 504 aa, rat
MDLLSALTLETWVLLAVVLVLLYGFGTRTHGLFKKQGIPGPKPLPFFGTVLNYYMGLWKFDVECHKKYGKIWGLFDGQMPLFAITDTEMIKNVLVKECFSVFTNRRDFGPVGIMGKAVSVAKDEEWKRYRALLSPTFTSGRLKEMFPIIEQYGDILVKYLKQEAETGKPVTMKKVFGAYSMDVITSTSFGVNVDSLNNPKDPFVEKTKKLLRFDFFDPLFLSVVLFPFLTPIYEMLNICMFPKDSIEFFKKFVYRMKETRLDSVQKHRVDFLQLMMNAHNDSKDKESHTALSDMEITAQSIIFIFAGYEPTSSTLSFVLHSLATHPDTQKKLQEEIDRALPNKAPPTYDTVMEMEYLDMVLNETLRLYPIGNRLERVCKKDVEINGVFMPKGSVVMIPSYALHRDPQHWPEPEEFRPERFSKENKGSIDPYVYLPFGNGPRNCIGMRFALMNMKLALTKVLQNFSFQPCKETQIPLKLSRQGLLQPTKPIILKVVPRDEIITGS

SEQ ID NO: 428 - protein, 636 aa, rat
APGEKGEGGPPGAAGPPGGSGPAGPPGPQGVKGERGSPGGPGAAGFPGGRGLPGPPGNNGNPGPPGPSGAPGKDGPPGPAGNSGSPGNPGVAGPKGDAGQPGEKGPPGAQGPPGSPGPLGIAGLTGARGLAGPPGMPGPRGSPGPQGIKGESGKPGASGHNGERGPPGPQGLPGQPGTAGEPGRDGNPGSDGQPGRDGSPGGKGDRGENGSPGAPGAPGHPGPPGPVGPSGKNGDRGETGPAGPSGAPGPAGARGAPGPQGPRGDKGETGERGSNGIKGHRGFPGNPGPPGSPGAAGHQGAVGSPGPAGPRGPVGPHGPPGKDGSSGHPGPIGPPGPRGNRGERGSEGSPGHPGQPGPPGPPGAPGPCCGGGAAIAGVGGEKSGGFSPYYGDDPMDFKINTEEIMSSLKSVNGQIESLISPDGSRKNPARNCRDLKFCHPELKSGEYWVDPNQGCKMDAIKVFCNMETGETCINASPMTVPRKHWWTDAGAEKKHVWFGESMNGGFQFSYGNPDLPEDVLDVQLAFLRLLSSRASQNITYHCKNSIAYMDQANGNVKKSLKLMGSNEGEFKAEGNSKFTYTVLEDGCTKHTGEWSKTVFEYQTRKAMRLPIIDIAPYDIGGPDQEFGVDIGPVCFL

SEQ ID NO: 429 - protein, 182 aa, rat; identical to SEQ ID NO: 320

SEQ ID NO: 430 - protein, 517 aa, rat
MAGPVPTLGLLAALVVCGSWGLNEEQRLIQHLFEEKGYNKELRPVARKEDIVDVALSLTLSNLISLKEVEETLTTNVWIDHAWIDSRLQWNANEFGNITVLRLPSDMVWLPEIVLENNNDGSFQISYACNVLVSDSGHVTWLPPAIFRSSCPISVTYFPFDWQNCSLKFSSLKYTAKEIRLSLKQEEEDNRSYPIEWIIIDPEGFTENGEWEIVHRAAKVNVDPSVPMDSTNHQDVTFYLIIRRKPLFYIINILVPCVLISFMINLVFYLPGDCGEKTSVAISVLLAQSVFLLLISKRLPATSMAIPLVGKFLLFGMVLVTMVVVICVIVLNIHFRTPSTHVLSEGVKKFFLETLPKLLHMSRPEEEDPGPRALIRRTSSLGYISKAEEYFSLKSRSDLMFEKQSERHGLARRLTTARKPPASSEQVQQELFNEMKPAVDGANFIVNHMRDQNSYNEEKDNWNQVARTVDRLCLFVVTPVMVVGTAWIFLQGVYNQPPPQPFPGDPFSYDEQDRRFI

SEQ ID NO: 431 - protein, 225 aa, rat
PVKGGSKCIKYLLFGFNFIFWLAGIAVLAIGLWLRFDSQTKSIFEQETNHSSFYTGVYILIGAGALMMLVGFLGCCGAVQESQCMLGLFFGFLLVIFAIEIAAAVWGYTHKDEVIKELQEFYKDTYQKLRNKDEPQRETLKAIHMALNCCGIAGGVEQFISDICPKKQVLESFQVKSCPDAIDEVFHSKFHIIGAVGIGIAVVMIFGMIFSMILCCAIRRSREMV

SEQ ID NO: 432 - protein, 226 aa, rat
MPGKPVLYYFDGRGRMEPIRWLLAAAGVEFEEQFLKTRDDLARLRNDGSLMFQQVPMVEIDGMKLVQTRAILNYIATKYNLYGKDMKERALIDMYAEGVADLDEIVLHYPYIPPGEKEASLAKIKDKARNRYFPAFEKVLKSHGQDYLVGNRLSRADVYLVQVLYHVEELDPSALANFPLLKALRTRVSNLPTVKKFLQPGSQRKPLEDEKCVGNPQLSLQLFRHL

SEQ ID NO: 433 - protein, 377 aa, rat; identical to SEQ ID NO: 335

SEQ ID NO: 434 - protein, 1453 aa, rat; identical to SEQ ID NO: 344

SEQ ID NO: 435 - protein, 722 aa, rat
MSSARTPLPTLNERDTEQPTLGHLDSKPSSKSNMLRGRNSATSADEQPHIGNYRLLKTIGKGNFAKVKLARHILTGKEVAVKIIDKTQLNSSSLQKLFREVRIMKVLNHPNIVKLFEVIETEKTLYLVMEYASGGEVFDYLVAHGRMKEKEARAKFRQIVSAVQYCHQKFIVHRDLKAENLLLDADMNIKIADFGFSNEFTFGNKLDTFCGSPPYAAPELFQGKKYDGPEVDVWSLGVILYTLVSGSLPFDGQNLKELRERVLRGKYRIPFYMSTDCENLLKKFLILNPSKRGTLEQIMKDRWMNVGHEDDELKPYVEPLPDYKDPRRTELMVSMGYTREEIQDSLVGQRYNEVMATYLLLGYKSSELEGDTITLKPRPSADLTNSSAPSPSHKVQRSVSANPKQRRSSDQAVPAIPTSNSYSKKTQSNNAENKRPEEETGRKASSTAKVPASPLPGLDRKKTTPTPSTNSVLSTSTNRSRNSPLLDRASLGQASIQNGKDSTAPQRVPVASPSAHNISSSSGAPDRTNFPRGVSSRSTFHAGQLRQVRDQQNLPFGVTPASPSGHSQGRRGASGSIFSKFTSKFVRRNLNEPESKDRVETLRPHVVGGGGTDKEKEEFREAKPRSLRFTWSMKTTSSMEPNEMMREIRKVLDANSCQSELHERYMLLCVHGTPGHENFVQWEMEVCKLPRLSLNGVRFKRISGTSMAFKNIASKIANELKL

SEQ ID NO: 436 - protein, 70 aa, rat
MPRLPPILRLLQAPEKYTVIPKARISSKPAKSPTSAMDQAVGMSVIIAGFMVPAGWVLSHLESYKRSSAA

SEQ ID NO: 437 - protein, 561 aa, rat; identical to SEQ ID NO: 353

SEQ ID NO: 438 - protein, 351 aa, rat
MDYKSGLIPDGNAMENLEKQLICPICLEMFTKPVVILPCQHNLCRKCANDIFQAANPYWTNRGGSVSMSGGRFRCPSCRHEVIMDRHGVYGLQRNLLVENIIDIYKQECSSRPLQKGSHPMCKEHEDEKINIYCLTCEVPTCSLCKVFGAHQACEVAPLQSIFQGQKTELSNCISMLVAGNDRVQTIISQLEDSCRVTKENSHQVKEELSHKFDALYAILDEKKSELLQRITQEQEEKLDFIEALILQYREQLEKSTKLVETAIQSLDEPGGATFLLSAKPLIKSIVEASKGCQLGKTEQGFENMDYFTLNLEHIAEALRAIDFGTDEEEEFTEEEEEEDQEEGVSTEGHQ

SEQ ID NO: 439 - protein, 424 aa, rat
MSDHADVSLPPQDRVRILSQLGSAVELNEDIPPRRYFRSGVEIIRMASIYSEEGNIEHAFILYNKYITLFIEKLPKHRDYKSAIIPEKKDAVKKLKNVAFPKAEELKTELLKRYTKEYEQYKERKKKEEEELARNIAIQQELEKEKQRVAQQKQKQLEQEQFHAFEKMIQKQELEKERLKIVQEFGKVDPGPCGPLLPDLEKPCVDVAPSSPFSPTQTSDCNTTLRPAKPPVVDRSLKPGALSVIENVPTIEGLRHIVVPRNLCSEFLQLASANTAKGIETCGVLCGKLMRNEFTITHVLIPRQNGGPDYCHTENEEEIFFMQDDLGLLTLGWIHTHPTQTAFLSSVDLHTHCSYQMMLPESIAIVCSPKFQETGFFKLTDYGLQEISTCRQKGFHPHGRDPPLFCDCSHVTVKDRIVTITDLR

SEQ ID NO: 440 - protein, 1935 aa, rat; identical to SEQ ID NO: 311

SEQ ID NO: 441 - protein, 1861 aa, rat
MADERKDEGKAPHWTSASLTEAAAHPHSPEMKDQGGSGEGLSRSANGFPYREEEEGAFGEHGSQGTYSDTKENGINGELTSADRETAEEVSARIVQVVTAEAVAVLKGEQEKEAQHKDQPAALPLAAEETVNLPPSPPPSPASEQTAALEEDLLTASKMEFPEQQKLPSSFAEPLDKEETEFKMQSKPGEDFEHAALVPQPDTSKTPQDKKDPQDMEGEKSPASPFAQTFGTNLEDIKQITEPSITVPSIGLSAEPLAPKDQKDWFIEMPVESKKDEWGLAAPISPGPLTPMREKDVLEDIPRWEGKQFDSPMPSPFHGGSFTLPLDTVKDERVTEGSQPFAPVFFQSDDKMSLQDTSGSATSKESSKDEEPQKDKADKVADVPVSEATTVLGDVHSPAVEGFVGENISGEEKGTTDQEKKETSTPSVQEPTLTETEPQTKLEETSKVSIEETVAKEEESLKLKDDKAGVIQTSTEQSFSKEDQKGQEQTIEALKQDSFPISLEQAVTDAAMATKTLEKVTSEPEAVSEKREIQGLFEEDIADKSKLEGAGSATVAEVEMPFYEDKSGMSKYFETSALKEDVTRSTGLGSDYYELSDSRGNAQESLDTVSPKNQQDEKELLAKASQPSPPAHEAGYSTLAQSYTSDHPSELPEEPSSPQERMFTIDPKVYGEKRDLHSKNKDDLTLSRSLGLGGRSAIEQRSMSINLPMSCLDSIALGFNFGRGHDLSPLASDILTNTSGSMDEGDDYLPPTTPAVEKIPCFPIESKEEEDKTEQAKVTGGQTTQVETSSESPFPAKEYYKNGTVMAPDLPEMLDLAGTRSRLASVSADAEVARRKSVPSEAVVAESSTGLPPVADDSQPVKPDSQLEDMGYCVFNKYTVPLPSPVQDSENLSGESGSFYEGTDDKVRRDLATDLSLIEVKLAAAGRVKDEFTAEKEASPPSSADKSGLSREFDQDRKANDKLDTVLEKSEEHVDSKEHAKESEEVGDKVELFGLGVTYEQTSAKELITTKETAPERAEKGLSSVPEVAEVETTTKADQGLDVAAKKDDQSPLDIKVSDFGQMASGMSVDAGKTIELKFEVDQQLTLSSEAPQETDSFMGIESSHVKDGAKVSETEVKEKVAKPDLVHQEAVDKEESYESSGEHESLTMESLKPDEGKKETSPETSLIQDEVALKLSVEIPCPPPVSEADSSIDEKAEVQMEFIQLPKEESTETPDIPAIPSDVTQPQPEAVVSEPAEVRGEEEEIEAEGEYDKLLFRSDTLQITDLLVPGSREEFVETCPGEHKGVVESVVTIEDDFITVVQTTTDEGELGSHSVRFAAPVQPEEERRPYPHDEELEVLMAAEAQAEPKDGSPDAPATPEKEEVPFSEYKTETYDDYKDETTIDDSIMDADSLWVDTQDDDRSILTEQLETIPKEERAEKEARRPSLEKHRKEKPFKTGRGRISTPERREVAKKEPSTVSRDEVRRKKAVYKKAELAKESEVQAHSPSRKLILKPAIKYTRPTHLSCVKRKTTATSGESAQAPSAFKQAKDKVTDGITKSPEKRSSLPRPSSILPPRRGVSGDREENSFSLNSSISSARRTTRSEPIRRAGKSGTSTPTTPGSTAITPGTPPSYSSRTPGTPGTPSYPRTPGTPKSGILVPSEKKVAIIRTPPKSPATPKQLRLINQPLPDLKNVKSKIGSTDNIKYQPKGGQVRILNKKMDFSKVQSRCGSKDNIKHSAGGGNVQIVTKKIDLSHVTSKCGSLKNIRHRPGGGRVKIESVKLDFKEKAQAKVGSLDNAHHVPGGGNVKIDSQKLNFREHAKARVDHGAEIITQSPSRSSVASPRRLSNVSSSGSINLLESPQLATLAEDVTAALAKQGL

SEQ ID NO: 442 - protein, 94 aa, rat
PLKVLSRSMASASKGDHGGAGANTWRLLTFVLALPSVALCSLNCWMHAGHHERPEFIPYHHLRIRTKPFSWGDGNHTLFHNPHVNPLPTGYEQP

SEQ ID NO: 443 - protein, 779 aa, rat
THEEHHEAKTLGIGKAIAVLTSGGDAQGMNATVRAVVRVGIFTGLRVFFVHEGYQGLVDGGEHIREATWESVSMMLQLGGTVIGSARCKDFREREGRLRAAHNLVKRGITNLCVIGGDGSLTGADTFRSEWSDLLNDLQKDGKITAEERTKSSYLNIVFLVGSIDNDFCGTDMTIGTDSALHRIVEIVDAITTTAQSHQRTFVLEVMGRHCGYLALVTSLSCGADWVFIPECPPDDDWEEHLCRRLSETRTRGSRLNIIIVAEGAIDKNGKPITSEDIKNLVVKRLGYDTRVTVLGHVQRGGTPSAFDRILGSRMGVEAVMALLEGTPDTPACVVSLSGNTAVRLPLMECVQVTKDVTKAMDEKRFDEAIKLRGRSFMNNWEVYKLLAHVRPPVSKGGLHTVAVMNVGAPAAGMNAAVRSTVRIGLIQGNRVLVVHDGFEGLAKGQIEEAGWSYVGGWTGQGGSKLGTKRTLPKKNLEQISANITKYNIQGLVIIGGFEAYTGGLELMEGRKQFDELCIPFVVIPATVSNNVPGSDFSIGADTALNTICTTCDRIKQSAAGTKRRVFIIETMGGYCGYLATMAGLAAGADAAYIFEEPFTIRDLQVNVEHLVQKMKTTVKRGLVLRNEKCNENYTTDFIFNLYSEEGKGIFDSRKNVLGHMQQGGNPTPFDRNFATKMGAKATNWMSGKIKESYRNGRIFANTPDSGCVLGMRKRALVFQPVTELKDQTDFEHRIPKEQWWLKLRPILKILAKYEIDLDTSDHAHLEHISRKRSGEAAV

SEQ ID NO: 444 - protein, 1861 aa, rat; identical to SEQ ID NO: 441

SEQ ID NO: 445 - protein, 70 aa, rat; identical to SEQ ID NO: 436

SEQ ID NO: 446 - protein, 319 aa, rat
MMVFRVEELVTGKKNSNGSSGEFLPGEFRNGEYEAAVALEKQEDLKTLPANSVNLGEEQRKSEKVREAELKKKKLEQRSKLENLEDLEIIVQLKKRKKYKKTKVPVVKEPEPEIITEPVDVPRFLKAALENKLPVVEKFLSDKNSPDVCDEYKRTALHRACLEGHLAIVEKLMEAGAQIEFRDMLESTAIHWACRGGNLDVLKLLLNKGAKISARDKLLSTALHVAVRTGHYECAEHLIACEADLNAKDREGDTPLHDAVRLNRYKMIRLLMTFGADLNVKNCAGKTPMDLVLHWQNGTKAIFDSLKENAYKNSRIATF

SEQ ID NO: 447 - protein, 313 aa, rat
  misc_feature (45)..(45): Xaa can be any naturally occurring amino acid
AATASPGAGRMDGKPRTSPKSVKFLFGGLAGMGATVFVQPLDLVXNRMQLSGEGAKTREYKTSFHALTSILKAEGLRGIYTGLSAGLLRQATYTTTRLGIYTVLFERLTGADGTPPGFLLKALIGMTAGATGAFVGPPAEVALIRMTADGRLPADQRRGYKNVFNALIRIAREEGVPTLWRGCIPTMARAVVVNAAQLASYSQSKQFLLDSGYFSDNILCHFCAIMISGLVTTAASMPVDIVKTRIQNMRMIDEKPEYKNGLDVLLKVVRYEGFFSLWKGFTPYYARLGPHTVLTFIFLEQMNKAYKRLFLSG

SEQ ID NO: 448 - protein, 332 aa, rat; identical to SEQ ID NO: 359

SEQ ID NO: 449 - protein, 727 aa, rat
MAKDKGLISPEDFAQLQKYIDYSTKSVSDVLKVFEMNKYCQGDEIGYLGFEQFLKMYLEVEEVPHHLCWTLFWSFHSSQDLDEETESKANVICLSDVYCYFTLLEGGSPEDKLEFTFKLYDMDRNGILDSTEVEKIILQMMRVAEYLDWDVSELRPILQEMMKEMDRDGSGCVSLAEWVRAGATTVPLLVLLGIDMTMKDDGHHIWRPKRFSRPVYCNLCELSIGLGKQGLSCNLCKYIVHDHCAMKAQPCEVSTYAKSRKDIGVQPHVWVRGGCHSGRCDRCQKKIRTYHSLTGLHCVWCHLEIHDDCLQAVGPECDCGLLRDHILPPCSIYPRVLVSGQECKQKTTDVTSLCTPEAFRIEPVSNTHPLLVFINPKSGGKQGQSVLWKFQYILNPRQVFNLKDGPEPGLRFFKDVPQFRVLVCGGDGTVGWILETIDKANFPIVPPVAVLPLGTGNDLARCLRWGRGYEGENLRKILKDIEISKVVYLDRWLLEVIPQQNGEKSDPVPSQIINNYFSIGVDASIAHRFHLMREKYPEKFNSRMKNKLWYLEFATSESIFSTCKKLEESVTVEICGKLLDLSDLSLEGIAVLNIPSMHGGSNLWGDTKRPHGDTCGINQALGSVAKIITDPDILKTCVPDMSDKRLEVVGIEGVIEMGQIYTRLKSAGHRLAKCSEITFQTTKTLPMQVDGEPWMQAPCTIKITHKNQMPMLMGPAPSSSNFFGFWS

SEQ ID NO: 450 - protein, 900 aa, rat
MMMVMQPEGLGAGEGPFSGGGGGEYMEQEEDWDRDLLLDPAWEKQQRKTFTAWCNSHLRKAGTQIENIEEDFRNGLKLMLLLEVISGERLPRPDKGKMRFHKIANVNKALDFIASKGVKLVSIGAEEIVDGNLKMTLGMIWTIILRFAIQDISVEETSAKEGLLLWCQRKTAPYRNVNVQNFHTSWKDGLALCALIHRHRPDLIDYAKLRKDDPIGNLNTAFEVAEKYLDIPKMLDAEDIVNTPKPDEKAIMTYVSCFYHAFAGAEQAETAANRICKVLAVNQENEKLMEEYEKLASELLEWIRRTVPWLENRVGEPSMSAMQRKLEDFRDYRRLHKPPRVQEKCQLEINFNTLQTKLRLSHRPAFMPSEGKLVSDIANAWRGLEQVEKGYEDWLLSEIRRLQRLQHLAEKFQQKASLHEAWTRGKEEMLNQHDYESASLQEVRALLRRHEAFESDLAAHQDRVEHIAALAQELNELDYHEAASVNSRCQAICDQWDNLGTLTQKRRDALERMEKLLETIDQLQLEFARRAAPFNNWLDGAIEDLQDVWLVHSVEETQSLLTAHEQFKATLPEADRERGAILGIQGEIQKICQTYGLRPKSGNPYITLSSQDINNKWDTVRKLVPSRDQTLQEELARQQVNERLRRQFAAQANAIGPWIQGKVEEVGRLAAGLAGSLEEQMAGLRQQEQNIINYKSNIDRLEGDHQLLQEGLVFDNKHTVYSMEHIRVGWEQLLTSIARTINEVENQVLTRDAKGLSQEQLNEFRASFNHFDRKRNGMMEPDDFRACLISMGYDLGEVEFARIMTMVDPNAAGVVTFQAFIDFMTRETAETDTAEQVVASFKILAGDKNYITPEELRRELPAEQAEYCIRRMAPYKGSGAPSGALDYVAFSSALYGESDL

SEQ ID NO: 451 - protein, 656 aa, rat
MNDVSQKAEILLSSSKPVPKSYVPKLGKGDVKDKFEAMQRAREERNQRRSRDEKQRRKEQYIREREWNRRKQEIKDMLASDEEEEPSKVEKAYVPKLTGTVKGKFDEMEKHRQEEQRKRTEEERKRRIEQDLLEKRKMQRELAKRAEQEGDDSLLITVVPAKSYRAAANRKDPEDLDREHRNGRVSQEEEKTRHEEECRALKEAKCLSLVMDDETEAKKESRFPGKLKSTFEELERQRQENRKKQAEEEARRRLEEERRAFEEARRNMVNEEDESQDTETVFKEYRPGKLRLSFEEIERQRREEEKRKAEEEARRRMEEEKKAFAEARRSMVLDDDSPEIYKAVSQESLTPGKLEINFEQLLRQKMEEERRRTEEERRQKLEMEKQEFEQLRQEMGKEEEENESFGLSREYEELIKLKRSGSIQAKNLKSKFEKIGQLSEKEVQKKIEEERAKRRAIDLEIKEREAENFHEDDDVDVKPAKKSESPFTHKVNMKARFEQMAKARQEEEQRRIEEQKLLRMQFEQKEIDAALQKKREDDEEEEGSIVNGSTTEDEEQTRSGAPWFKKPLRNTSVVDSEPVRFTVKVTGEPKPEVTWWFEGELLQDGEDYQYIERGETYCLYLPETFPEDGGEYMCKAVNSKGSAASTCILTIEMDDY

SEQ ID NO: 452 - protein, 70 aa, rat; identical to SEQ ID NO: 409

SEQ ID NO: 453 - protein, 94 aa, rat
SALTVQFVQGIFVEKYDPTIEDSYRKQVEVDCQQCMLEILDTAGTEQFTAMRDLYMKNGQGFALVYSITAQSTFNDLQDLREQILRVKDTEDVP

SEQ ID NO: 454 - protein, 70 aa, rat
MMEVESSYSDFISCDRTGRRNAVPDIQGDSEAVSVRKLAGDMGELALEGAEGQAEGSTPDKEASSQPESS

SEQ ID NO: 455 - protein, 182 aa, rat; identical to SEQ ID NO: 388

SEQ ID NO: 456 - protein, 591 aa, rat
MSNYNVSLVGPAPWGFRLQGGKDFNMPLTISSLKDGGKASQAHVRIGDVVLSIDGISAQGMTHLEAQNKIKACTGSLNMTLQRASAAAKSEPVAVQKGEPKEVVKPVPITSPAVSKVTSTTNMAYNKVPRPFGSVSSPKVTSIPSPSSAFTPAHAATSSHASPPPVAAVTPPPLSASGLHASANPSAAQCSSPPNTGKPAVHVPRQPTVTSVCSESAQELAEGQRRGSQGDIKQQNGPPRKHIVERNTEFYHIPTHSDASKKRLIEDTEDWRPRTGTTQSRSFRILAQITGTEHLKESENDNAKKANSTPEPSQQSASPLSAAESLESPGSNRPVVAGLRSAAAFKPVGSTSVKSPSWQRPNQAAPSTGRISNSASSSGTGAPMKPAVGPPQPSDQDTLVQRAEHIPAGKRTPMCAHCNQAIRGPFLVALGKSWHPEEFNCAHCKNTMAYIGFVEEKGALYCELCYEKFFAPECGRCQRKILGEVINALKQTWHVSCFVCVACGKPIRNNVFHLEDGEPYCETDYYALFGTICRGCEFPIEAGDMFLEALGSTWHDTCFVCSVCCESLEGQTFFSKKDKPLCKKHAHSVNF

SEQ ID NO: 457 - protein, 1725 aa, rat
MPPTVRWSAWCTGWLWIFGAALGQCLGYGSEQQRVAFLQHPGQNHLQASYMELRPSQGCRPGYYRDIKSFPAGRSVPCNCNGHSNRCQDGSGVCINCQHNTAGEHCERCKRGYYGSAIHGSCRVCPCPHTNSFATGCAVDGGAVRCACKPGYTGAQCERCAPGYFGNPQKFGGSCQPCNCNSNGQFGTCDPLTGDCVSQEPKDGSPAEECDDCDSCVMTLLNDLVPMGEELALVKSKLQGLSVNTGSLEQIRHVEMQAKDLRNQLLGFRSAISSHGSQMDGLEKELSHLYQEFETLQEKAQVNSRKAQTLYNNIDTTIQNAKELDMKIKNILTNVHILLKQIARPGGEGMDLPVGDWSRESAEAQRMLRELRGRDFKKHLQEAEAQKMEAQLLLNRIRTWLESHQVENNGLLKNIRDSLNDYEAKLQDLRSVLQEAAAQGKQATGLNHENEGVLGAIQRQMKEMDSLKKYLTEHLATADASLLQTNSLLQRMDTSQKEYESLAAALNGARQELNDQVRELSRSGGKAPLVAEAEKHAQSLQELAKQLEEIKRNTSGDESVRCVVDAATAYESILNAIRAAEDAAGKADSASESAFQTVIKEDLPRRAKTLSSDSEELLNEAKMTRKRLQQEINPALNSLQQTLKTVSVQKDLLDANVTAVRNDLRGIQRGDIDSVVSGAKSMVRKANGITSEVLDGLSPIQTDLGRIKDSYGSTRHEDFNKALIDANNSVKKLTKKLPDLFVKIESINQQLLPLGNISDNVDRIRELITQARDAANKVAIPMRFNGKSGVEVRLPNDLEDLKGYTSLSLFLQRPDLRENGGTEDMFVMYLGNKDASKDYIGMAVVDGQLTCVYNLGDREAEVQIDQVLTESESQEAVMDRVKFQRIYQFAKLNYTKEATSNKPKAPAVYDLEGGSSNTLLNLDPEDAVFYVGGYPPDFELPSRLRFPPYKGCIELDDLNENVLSLYNFKTTFNLNTTEVEPCRRRKEESDKNYFEGTGYARIPTQPNAPFPNFIQTIQTTVDRGLLFFAENQDNFISLNIEDGNLMVRYKLNSEPPKEKGIRDTINDGKDHSILITIGKLQKRMWINVNERSVRIEGEIFDFSTYYLGGIPIAIRERFNISTPAFQGCMKNLKKTSGVVRLNDTVGVTKKCSEDWKLVRTASFSRGGQMSFTNLDVPSTDRFQLSFGFQTFQPSGTLLNHQTRTSSLLVTLEDGHIELSTRDSNIPIFKSPGTYMDGLLHHVSVISDTSGLRLLIDDQVLRRNQRLPSFSNAQQSLRLGGGHFEGCISNVLVQRFSQSPEVLDLASKSTKKDASLGGCSLNKPPFLMLFKSPKRFNKGRIFNVNQLMQDAPQATRSTEAWQDGRSCLPPLNTKASHRALQFGDSPTSHLLLKLPQELLKPRSQFSLDIQTTSPKGLVFYAGTKDSFLALYVADGRVVFALGAGGKKLRLRSKERYHDGKWHTVVFGLNGGKARLVVDGLRAQEGSLPGNSTISPREQVYLGLPLSRKPKSLPQHSFVGCLRDFQLNSKPLDSPSARFGVSPCLGGSLEKGIYFSQGGGHVILANSVSLGPELKLTFSIRPRSLTGVLIHVGSQSGQRLSVYMEAGKVTTSVSSDAGGSVTSITPKQSLCDGQWHSVAVSIKQRILHLELDTDSSYTVAPLSFSPNSTRGSLHVGGVPDKLKMLTLPVWNSFFGCLKNIQVNHVPVPITEATEVQGSVSLNGCPDH

SEQ ID NO: 458 - protein, 1938 aa, rat; identical to SEQ ID NO: 403

SEQ ID NO: 459 - protein, 588 aa, rat
MAEMGSKGVTAGKIASNVQKKLTRAQEKVLQKLGKADETKDEQFEQCVQNFNKQLTEGTRLQKDLRTYLASVKAMHEASKKLSECLQEVYEPEWPGRDEANKIAENNDLLWMDYHQKLVDQALLTMDTYLGQFPDIKSRIAKRGRKLVDYDSARHHYESLQTAKKKDEAKIAKPVSLLEKAAPQWCQGKLQAHLVAQTNLLRNQAEEELIKAQKVFEEMNVDLQEELPSLWNSRVGFYVNTFQSIAGLEENFHKEMSKLNQNLNDVLVSLEKQHGSNTFTVKAQPSDSAPEKGNKSPSPPPDGSPAATPEIRVNHEPEPASGASPGATIPKSPSQLRKGPPVPPPPKHTPSKEMKQEQILSLFDDAFVPEISVTTPSQFEAPGPFSEQASLLDLDFEPLPPVASPVKAPTPSGQSIPWDLWEPTESQAGVLPSGEPSSAEGSFAVAWPSQTAEPGPAQPAEASEVVGGTQEPGETAASEATSSSLPAVVVETFSATVNGAVEGSTTTGRLDLPPGFMFKVQAQHDYTATDTDELQLKAGDVVLVIPFQNPEEQDEGWLMGVKESDWNQHKELEKCRGVFPENFTERVQ

SEQ ID NO: 460 - protein, 477 aa, rat
MADMLGLMQRLEFAVSRLERLSSGLHEPPGGCGEVNSLSRGIVAPSVEAFDKLINSMVAEFLKNSRVLAGDVETHAEMVHGAFQAQRAFLLMVSQHQQPQENEVAVLLKPISEKIQEIQTFRERNRGSDMFNHLSAVSESIAALGWIAVSPKPGPYVKEMNDAATFYTNRVLRDYKHSDLRHVDWVRSYLKIWSELQAYIKEHHTTGLTWSKTGPVASTASAFSILSSGPGLPPPPPPPPPPGPPPPFENEGGKEEPSPSRSALFAQLNQGEAITKGLRHVTDDKKIYKNPSLRAQGQIRSPTKTRTPSPTSSKSNSPQKHAPVLELEGKKWRVEYQEDRNDLVISETELKQVAYIFKCDKSTLQIKGKVNSITVDNCKKFGLVFDHVVGIVEVINSKDIQIQVMGRVPTISINKTEGCHLYLSKDALDCEIVSAKSSEMNVLVPQGDDYREFPIPEQFKTIWDGSKLITEPAEIMA

SEQ ID NO: 461 - protein, 780 aa, rat
MAPYSLLVTRLQKALGVRQYHVASALCQRAKVAMSHFEPSEYIRYDLLEKNINIVRKRLNRPLTLSEKIVYGHLDDPANQEIERGKTYLRLRPDRVAMQDATAQMAMLQFISSGLPKVAVPSTIHCDHLIEAQLGGEKDLRRAKDINQEVYNFLATAGAKYGVGFWRPGSGIIHQIILENYAYPGVLLIGTDSHTPNGGGLGGICIGVGGADAVDVMAGIPWEPKCPKVIGVKLTGTLSGWTSPKDVILKVAGILTVKGGTGAIVEYHGPGVDSISCTGMATICNMGAEIGATTPVFPYNHRMKKYLSKTGRADIANLAEEFKDHLVPDPGCQYDQVIEINLNELKPHINGPFTPDLAHPVADVGTVAEKEGWPLDIRVGLIGSCTNSSYEDMGRSAAVAKQALAHGLKCKSQFTITPGSEQIRATIERDGYAQILRDVGGIVLANACGPCIGQWDRKDIKKGEKNTIVTSYNRNFTGRNDANPETHAFVTSPEIVTALAIAGTLKFNPETDFLTGKDGKKFKLEAPDADELPRSDFDPGQDTYQHPPKDSSGQRVDVSPTSQRLQLLEPFDKWDGKDLEDQQILIKVKGKCTTDHISAAGPWLKFRGHLDNISNNLLIGAINIENGKANSVRNAVTQEFGPVPDTARYYKKHGIRWVMIGDENYGEGSSREHAALEPRHLGGRAIITKSFARIHETNLKKQGLLPLTFADPSDYNKIHPVDKLTIQGLKDFAPGKPLNCIIKHPNGTQETILLNHTFNETQIEWFRAGSALNRMKELQQ

SEQ ID NO: 462 - protein, 780 aa, rat; identical to SEQ ID NO: 461

SEQ ID NO: 463 - protein, 150 aa, rat; identical to SEQ ID NO: 354

SEQ ID NO: 464 - protein, 621 aa, rat; identical to SEQ ID NO: 339

SEQ ID NO: 465 - protein, 480 aa, rat
MLNFGASLQQASEGKMELISEKSKEGAHPWDKAEQSDFEAVEALMSMSCDWKSHFKKYLENRPVTPVSDTSEEDSLLPGTPDLQTVPAFCLTPPYSPSDFEPSQGSNLTAPAPPTGHFRSLSDAAKPPSIAPFKEEEKSPLAAPPLPKAQATSVIRHTADAQLCNHQSCPVKAASILNYQDNSFRRRTHINVEATRKNIPCAAVSPNRPKPEPSTAANGAEKAGTAPYDFAVPSSETVICRSSQPAPTSPVQKSVLMSSPTVSTGGVPPLPVICQMVPLPANNSLVTTVVPSSPPSQPPAVCSPVLFMGTQVPKGTVMFVVPQPVVQSPKPPVVSPNGTRLSPIAPAPGFSPSAARVTPQIDSSRVRSHICSHPGCGKTYFKSSHLKAHVRTHTGEKPFSCSWKGCERRFARSDELSRHRRTHTGEKKFACPMCDRRFMRSDHLTKHARRHLSAKKLPNWQMEVSKLNDIALPPATASAQ

SEQ ID NO: 466 - protein, 451 aa, rat
SLPGRGDPVASVLSPYFGTKTRYEDVNPWLLGDPVAPRRDPELLAGTCTPVQLVALIRHGTRYPTTKQIRKLRQLQGLLQTRESVDGGSRVAAALDQWPLWYDDWMDGQLVEKGRQDMRQLALRLAALFPDLFCRENYGRLRLITSSKHRCVDSSAAFLQGLWQHYHPGLPPPDVSDMECDPPRVNDKLMRFFDHCEKFLTEVERNATALYHVEAFKTGPEMQTVLKKVAATLQVPVNNLNADLIQVAFFTCSFDLAIQGVHSPWCDVFDVDDAKVLEYLNDLKQYWKRSYGYAINSRSSCNLFQDIFLHLDKAVEQKQRSQPVSSSVILQFGHAETLLPLLSLMGYFKDKEPLTAYNFEEQVHREFRSGHIVPYASNLIFVLYHCEDAQTPQEKFQIQMLLNEKVLPLAHSQKTVALYEDLKNHYQDILQSCQTSKECNLPKVNITSDEL

SEQ ID NO: 467 - protein, 816 aa, rat
MGDMVVEPATLKPTSEPTPSPSGNNGGSLLSVITEGVGELSVIDPEVAQKACQEVLEKVKLLHGGVAISSKGSPLELVNGDGVDNEIRCLDDPPTEIREEEDEMEPGVVSGTAKGTRRRRQNNSAKQSWLLRLFESKLFDISMAISYLYNSKEPGVQAYIGNRLFCFRNEDVDFYLPQLLNMYIHMDEDVGDAIKPYIVHRCRQSINFSLQCALLLGAYSSDMHISTQRHSRGTKLRKLILSDELKPAHRKRELPTLSPAPDTGLSPSKRTHQRSKSDATASISLSSNLKRTASNPKVENEDEELSSSTESIDNSFSSPVRLAPEREFIKSLMAIGKRLATLPTKEQKTQRLISELSLLNHKLPARVWLPTAGFDHHVVRVPHTQAVVLNSKDKAPYLIYVEVLECENFDTTNVPARIPENRIRSTRSVENLPECGITHEQRAGSFSTVPNYDNDDEAWSVDDIGELQVELPEVHTNSCDNISQFSVDSITSQESKEPVFIAAGDIRRRLSEQLAHTPTAFKRDPEDPSAVALKEPWQEKVRRIREGSPYGHLPNWRLLSVIVKCGDDLRQELLAFQVLKQLQSIWEQERVPLWIKPYKILVISADSGMIEPVVNAVSIHQVKKQSQLSLLDYFLQEHGSYTTEAFLSAQRNFVQSCAGYCLVCYLLQVKDRHNGNILLDAEGHIIHIDFGFILSSSPRNLGFETSAFKLTTEFVDVMGGLNGDMFNYYKMLMLQGLIAARKHMDKVVQIVEIMQQGSQLPCFHGSSTIRNLKERFHMSMTEEQLQLLVEQMVDGSMRSITTKLYDGFQYLTNGIM

SEQ ID NO: 468 - protein, 198 aa, rat
MDAILNYRPEGSEDYYTLLGCDELSSVEQILAEFKVRALECHPDKHPENSKAVETFQKLQKAKEILSNAESRARYDHWRRSQMSMSFEQWEALADSVKTSMHWAVRSKKDLMLEGSEQTYTNTAQNKERSEQRETKQGDPDSTPEKMMQKESESPEKGISPQNPDSPGLSDWNCGHLHFRWSGDTPSELLRKFRNYEI

SEQ ID NO: 469 - protein, 1938 aa, rat; identical to SEQ ID NO: 403

SEQ ID NO: 470 - protein, 377 aa, rat; identical to SEQ ID NO: 324

SEQ ID NO: 471 - DNA, 2427 bp, human
ggagctaaggccttcagtgtccccttccttacccaggtttctcacagaatggattcccagcggaacttgcagaggaactgcggctttaccaatccacccttcttcaggatggtctaaaagatctcctggatgagaaaaaattcatcgattgcaccctaaaagcaggtgacaaaagtcttccttgccacagattgattttgtcagcttgtagtccttacttccgtgagtactttttatctgaaattgatgaggcgaaaaaaaaggaggtagtgctagacaatgtggatcctgctatacttgatttaatcatcaaatacctgtactctgccagtattgatctcaatgacggaaatgtgcaagatatttttgcattggccagccgctttcagatcccctcagtgtttactgtctgcgtttcttatcttcagaaaagacttgctcctggtaactgtctagccatcctaagattaggacttcttcttgactgcccgagactcgccatttctgcccgtgaatttgtgtctgatcgctttgtacagatttgtaaggaagaggactttatgcaactgtctccacaggaactgatctcagtcatttcaaatgacagcctaaatgtagaaaaagaagaagcagtatttgaggcagtgatgaaatgggtgcgaacagacaaggaaaacagggttaaaaaccttagtgaagtgtttgattgtatccgttttcgccttatgacagaaaaatattttaaggatcatgttgagaaagatgatataattaaaagcaacccagacctccagaaaaaaatcaaagttctaaaagatgctttcgcaggcaaactcccagaacctagcaaaaatgccgcgaagactggggctggtgaggtgaatggtgatgttggtgatgaagatttacttcctggttacctgaatgacattcccaggcatggaatgtttgtaaaaggcctcatcctcttggttaatgacacagcagcagtggcttatgaccccacggaaaatgaatgctaccttactgcactggctgagcagattcccagaaatcattccagcattgttacccagcaaaatcagatatatgtggtaggaggactatatgtggatgaaaaaaataaggttcaacctctacagtcatacttcttccagctcgatagcatagcatctgaatgggttggacttccacctctgccttcagccaggtgtctcttcggtctgggagaggtggatgataaaatctatgtagttgcaggcaaagaccttcaaacagaggcttcgctggattcagtattatgctatgatcctgtggctgcaaaatggaacgaagtaaaaaaactccctatcaaagtctatggccataatgtgatttcacataaagggatgatatattgtctaggaggaaagacagatgacaaaaaatgtacaaacagggtgtttatcttcaaccccaaaaaaggagattggaaagatctggctccaatgaaaattcctcgttccatgtttggagtagcagtccataaaggcaaaattgtgattgcaggaggtgtcactgaagatggtctttcagcttcagttgaagcttttgaccttacaacaaataaatgggatgtaatgaccgaatttccccaagaaagaagctccatcagtttggtcagcctggctggatctctgtatgcaattggtggttttgctatgattcaactggagtctaaagaatttgcacccactgaagtcaatgacatatggaagtatgaagatgataaaaaagaatgggctgggatgttgaaggaaatacgttatgcttcaggagctagttgcctagcaacacgtttaaatctcttcaaactgtctaaactgtgaacaaggtgacaaaacataatagattgggaggtggtttgtttggtgaatggggctttaatttattctgttttttaaaagcttgtacagacactcatgtagaaattattcaagaagttattgtctaagagatgagcagtaggtaagaaaacctcagtcattgactcttcaatgtaatgatcagagtttaaaaccattttctaataataaattaaatcttcagttgaacaaattattttgtgaatctgtttcactcaatggattgtaaagaaggctcctaaatttgagttgtttgctaatcatttcatttgcatcattagggtatccttaaactgattttctattacaattggaagtggagaatatgtgcatctacactaaaaaaatgtttaagatatcaaaaacctctcctcgtgcttcaaaatgacaggaatcctgtgcattatactaagaattacatgccataagatgacttcagaaatcctacttcagaagtgtaataaatggatggggaaatcgtttgatggggaaaagtctcttgtaagtaaaagtagtcaaattc

SEQ ID NO: 472 - DNA, 1066 bp, human
accccagctgttggggccaggacacccagtgagcccatacttgctctttttgtcttcttcagactgcgccatggggctcagcgacggggaatggcagttggtgctgaacgtctgggggaaggtggaggctgacatcccaggccatgggcaggaagtcctcatcaggctctttaagggtcacccagagactctggagaagtttgacaagttcaagcacctgaagtcagaggacgagatgaaggcatctgaggacttaaagaagcatggtgccactgtgctcaccgccctgggtggcatccttaagaagaaggggcatcatgaggcagagattaagcccctggcacagtcgcatgccaccaagcacaagatccccgtgaagtacctggagttcatctcggaatgcatcatccaggttctgcagagcaagcatcccggggactttggtgctgatgcccagggggccatgaacaaggccctggagctgttccggaaggacatggcctccaactacaaggagctgggcttccagggctaggcccctgccgctcccacccccacccatctgggccccgggttcaagagagagcggggtctgatctcgtgtagccatatagagtttgcttctgagtgtctgctttgtttagtagaggtgggcaggaggagctgaggggctggggctggggtgttgaagttggctttgcatgcccagcgatgcgcctccctgtgggatgtcatcaccctgggaaccgggagtgcccttggctcactgtgttctgcatggtttggatctgaattaattgtcctttcttctaaatcccaaccgaacttcttccaacctccaaactggctgtaaccccaaatccaagccattaactacacctgacagtagcaattgtctgattaatcactggccccttgaagacagcagaatgtccctttgcaatgaggaggagatctgggctgggcgggccagctggggaagcatttgactatctggaacttgtgtgtgcctcctcaggtatggcagtgactcacctggttttaataaaacaacctgcaacatctc

SEQ ID NO: 473 - DNA, 6008 bp, human
tgtctttccctgctgctctcaggtcccctgcaggccttggcccctttcctcatctgtagacacacttgagtagcccaggcacagccatgggagattcggagatggcagtctttggggctgccgccccctacctgcgcaagtcagagaaggagcggctagaagcgcagaccaggccttttgacctcaagaaggatgtcttcgtgcctgatgacaaacaggagtttgtcaaggccaagatcgtgtctcgagagggtggcaaagtcactgccgagactgagtatggcaagacagtgaccgtgaaggaggaccaggtgatgcagcagaacccacccaagttcgacaaaatcgaggacatggccatgctgaccttcctgcatgagcccgcggtgctctacaacctcaaggatcgctacggctcctggatgatctacacctactcgggcctcttctgtgtcaccgtcaacccttacaagtggctgccggtgtacactcctgaggtggtggctgcctaccggggcaagaagaggagcgaggccccgccccacatcttctccatctccgacaacgcctatcagtacatgctgacagacagagaaaaccagtccatcctgatcaccggagaatccggagcagggaagacagtcaacaccaagagggtcatccagtactttgctgttattgcagccattggggaccgcagcaagaaggaccagagcccgggcaagggcaccctggaggaccagatcatccaggccaaccctgctctggaggcctttggcaatgccaagaccgtccggaacgacaactcctcccgcttcgggaaattcattcgaattcattttggggcaacaggaaagttggcatctgcagacatagagacctatcttctggaaaaatccagagttattttccagctgaaagcagagagagattatcacattttctaccaaatcctgtctaacaaaaagcctgagctgctggacatgctgctgatcaccaacaacccctacgattatgcattcatctcccaaggagagaccaccgtggcctccattgatgacgctgaggagctcatggccactgataacgcttttgatgtgctgggcttcacttcagaggagaaaaactccatgtataagctgacaggcgccatcatgcactttggaaacatgaagttcaagctgaagcagcgggaggagcaggcggagccagacggcactgaagaggctgacaagtctgcctacctcatggggctgaactcagccgacctgctcaaggggctgtgccaccctcgggtgaaagtgggcaatgagtacgtcaccaaggggcagaatgtccagcaggtgatatatgccactggggcactggccaaggcagtgtatgagaggatgttcaactggatggtgacgcgcatcaatgccaccctggagaccaagcagccacgccagtacttcataggagtcctggacatcgctggcttcgagatcttcgatttcaacagctttgagcagctctgcatcaacttcaccaacgagaagctgcagcagttcttcaaccaccacatgtttgtgctggagcaggaggagtacaagaaggagggcatcgagtggacattcattgactttggcatggacctgcaggcctgcattgacctcatcgagaagcccatgggcatcatgtccatcctggaagaggagtgcatgttccccaaggccaccgacatgaccttcaaggccaagctgtttgacaaccacctgggcaaatccgccaacttccagaagccacgaaatatcaaggggaagcctgaagcccacttctccctgatccactatgccggcatcgtggactacaacatcattggctggctgcagaagaacaaggatcctctcaatgagactgtcgtgggcttgtatcagaagtcttccctcaagttgctcagcaccctgtttgccaactatgctggggctgatgcgcctattgagaagggcaaaggcaaggccaagaaaggctcgtcctttcagactgtgtcagctctgcacagggaaaatctgaacaagctgatgaccaacttgcgctccacccatccccactttgtacgttgtatcatccctaatgagacaaagtctccaggcgtgatggacaaccccctggtcatgcaccagctgcgctgcaatggtgtgctggagggcatccgcatctgcaggaaaggcttccccaaccgcatcctctacggggacttccggcagaggtatcgcatcctgaacccagcggccatccctgagggacagttcattgatagcaggaagggggcagagaagctgctcagctccctggacattgatcacaaccagtacaagtttggccacaccaaggtgttcttcaaggccgggctgctggggctgctggaggaaatgagggacgagaggctgagccgcatcatcacgcgtatccaggcccagtcccgaggtgtgctcgccagaatggagtacaaaaagctgctggaacgtagagactccctgctggtaatccagtggaacattcgggccttcatgggggtcaagaattggccctggatgaagctctacttcaagatcaagccgctgctgaagagtgcagaaagagagaaggagatggcctccatgaaggaggagttcacacgcctcaaagaggcgctagagaagtccgaggctcgccgcaaggagctggaggagaagatggtgtccctgctgcaggagaagaatgacctgcagctccaagtgcaggcggaacaagacaacctggcagatgctgaggagcgctgtgatcagctgatcaaaaacaagattcagctggaggctaaggtgaaggagatgaacgagaggctggaggatgaggaggagatgaatgctgagctcactgccaagaagcgcaagttggaagatgagtgctcagagctcaaaagggacatcgatgatctggagctgacactggccaaagtggagaaggagaaacacgcaacagagaacaaggtgaaaaacctgacagaggagatggctgggctggatgagatcattgccaagctgaccaaggagaagaaagctctgcaagaggcccaccaacaggctctggatgaccttcaggccgaggaggacaaggtcaacaccctgactaaggccaaagtcaagctggagcagcaagtggatgatctggaaggatccctggagcaagagaagaaggtgcgcatggacctggagcgagcgaagcggaagctggagggcgacctgaagctgacccaggagagcatcatggacctggagaatgacaagcagcagctggatgagcggctgaaaaaaaaagactttgagctgaatgctctcaacgcaaggattgaggatgaacaggccctcggcagccagctgcagaagaagctcaaggagcttcaggcacgcatcgaggagctggaggaggagctggagtccgagcgcaccgccagggctaaggtggagaagctgcgctcagacctgtctcgggagctggaggagatcagcgagcggctggaagaggccggcggggccacgtccgtgcagatcgagatgaacaagaagcgcgaggccgagttccagaagatgcggcgggacctggaggaggccacgctgcagcacgaggccactgccgcggccctgcgcaagaagcacgccgacagcgtggccgagctgggcgagcagatcgacaacctgcagcgggtgaagcagaagctggagaaggagaagagcgagttcaagctggagctggatgacgtcacctccaacatggagcagatcatcaaggccaaggctaacctggagaagatgtgccggaccttggaagaccagatgaatgagcaccggagcaaggcggaggagacccagcgttctgtcaacgacctcaccagccagcgggccaagttgcaaaccgagaatggtgagctgtcccggcagctggatgagaaggaggcactgatctcccagctgacccgaggcaagctcacctacacccagcagctggaggacctcaagaggcagctggaggaggaggttaaggcgaagaacgccctggcccacgcactgcagtcggcccggcatgactgcgacctgctgcgggagcagtacgaggaggagacggaggccaaggccgagctgcagcgcgtcctttccaaggccaactcggaggtggcccagtggaggaccaagtatgagacggacgccattcagcggactgaggagctcgaggaggccaagaagaagctggcccagcggctgcaggaagctgaggaggccgtggaggctgttaatgccaagtgctcctcgctggagaagaccaagcaccggctacagaatgagatcgaggacttgatggtggacgtagagcgctccaatgctgctgctgcagccctggacaagaagcagaggaacttcgacaagatcctggccgagtggaagcagaagtatgaggagtcgcagtcggagctggagtcctcgcagaaggaggctcgctccctcagcacagagctcttcaaactcaagaacgcctatgaggagtccctggaacatctggagaccttcaagcgggagaacaaaaacctgcaggaggagatctccgacttgactgagcagttgggttccagcggaaagactatccatgagctggagaaggtccgaaagcagctggaggccgagaagatggagctgcagtcagccctggaggaggccgaggcctccctggagcacgaggagggcaagatcctccgggcccagctggagttcaaccagatcaaggcagagatcgagcggaagctggcagagaaggacgaggagatggaacaggccaagcgcaaccacctgcgggtggtggactcgctgcagacctccctggacgcagagacacgcagccgcaacgaggccctgagggtgaagaagaagatggaaggagacctcaatgagatggagatccagctcagccacgccaaccgcatggccgccgaggcccagaagcaagtcaagagcctccagagcttgttgaaggacacccagattcagctggacgatgcagtccgtgccaacgacgacctgaaggagaacatcgccatcgtggagcggcgcaacaacctgctgcaggctgagctggaggagttgcgtgccgtggtggagcagacagagcggtcccggaagctggcggagcaggagctgattgagactagtgagcgggtgcagctgctgcattcccagaacaccagcctcatcaaccagaagaagaagatggatgctgacctgtcccagctccagactgaagtggaggaggcagtgcaggagtgcaggaatgctgaggagaaggccaagaaggccatcacggatgccgccatgatggcagaggagctgaagaaggagcaggacaccagcgcccacctggagcgcatgaagaagaacatggaacagaccattaaggacctgcagcaccggctggacgaagccgagcagatcgccctcaagggcggcaagaagcagctgcagaagctggaagcgcgggtgcgggagctggagaatgagctggaggccgagcagaagcgcaacgcagagtcggtgaagggcatgaggaagagcgagcggcgcatcaaggagctcacctaccagacggaggaggacaggaaaaacctgctgcggctgcaggacctggtagacaagctgcagctaaaggtcaaggcctacaagcgccaggccgaggaggcggaggagcaagccaacaccaacctgtccaagttccgcaaggtgcagcacgagctggatgaggcagaggagcgggcggacatcgccgagtcccaggtcaacaagctgcgggccaagagccgtgacattggcacgaagggcttgaatgaggagtagctttgccacatcttgatctgctcagccctggaggtgccagcaaagccccatgctggagcctgtgtaacagctccttgggaggaagcagaataaagcaattttccttgaagccga

SEQ ID NO: 474 - DNA, 3287 bp, human
ccctcaccgggggcaggagggaccaaggctgggcccagaacacatagtcctagggtaacagtgaaggggtcgtgaggggacagtgactcccttccaaccccttcttcatagggactgttggcaaacaaagaaaatcaactgggaaaatgaagacctgctggaaaattccagttttcttctttgtgtgcagtttcctggaaccctgggcatctgcagctgtcaagcgtcgccccagattccctgtcaattccaattctaatggtggaaatgaactctgtccaaagatcaggattggccaagatgacttaccagggtttgatctgatctctcagttccaggtagataaagcagcatctagaagagctatccagagagtagtgggatcagctacattgcaggtggcttacaagttgggaaataatgtagacttcaggattccaactaggaatttatatcccagtggactgcctgaagaatactccttcttgacgacgtttcgaatgactggaagcactctcaaaaagaactggaacatttggcagattcaggattcctctgggaaggagcaagttggcataaagattaatggccaaacacaatctgttgtattttcatacaagggactggatggaagtctccaaacagcagccttttcgaatttgtcctccttgtttgattcccagtggcataagatcatgattggcgtggagaggagtagtgctactctttttgttgactgcaacaggattgaatctttacctataaagccaagaggcccaattgacattgatggctttgctgtgctgggaaaacttgcagataatcctcaagtttctgttccatttgaacttcaatggatgctgatccattgtgaccccctgcggcccaggagagaaacttgccatgagctgccagccagaataacgcccagccagaccaccgacgagagaggtcccccgggtgagcagggtcctcccggggcctccggcccccctggagttccaggcatcgatggcatcgacggtgaccgaggtcctaagggccccccgggccccccgggtcctgcaggtgaaccgggaaagccaggagctccaggcaagcctggcacacctggcgctgatggattaacaggacctgatggatcccctggctccattgggtcaaagggacaaaaaggagaacctggtgtgcctggatcgcgtggatttccaggccgtggtattcctggaccccctggtcctcctgggacagcaggactccctggagagcttggccgtgtaggacctgttggtgaccctgggagaagaggaccacctggcccccctggccccccaggacccagaggaacaattggctttcatgatggagatccattgtgtcccaatgcctgtccaccaggtcgctcaggatatccaggcctaccaggcatgaggggtcataaaggggctaaaggagaaattggtgaaccaggaagacaaggacacaagggtgaagaaggtgaccagggagaactcggagaagttggagctcaaggacctccaggagcccagggtttgcgaggcatcaccggcatagttggggacaaaggggaaaaaggtgctcggggcttagatggtgaacctgggcctcagggtcttcctggtgcacctggtgatcaaggacagcgaggacctccaggagaagcaggtcccaaaggagatagaggggctgaaggtgctagaggaattcctggtctccctgggcccaaaggagacacgggtttgccaggtgtggatggccgtgatgggatccctggaatgcctggaacaaagggtgaaccaggaaaacctgggcctcctggtgatgcaggattgcaggggttaccaggtgtacctggaattcctggtgcaaagggtgttgctggtgaaaagggtagcacaggtgctccagggaagcctggtcagatgggaaattcaggcaaaccgggccaacaggggcctccaggagaggtgggaccccgaggaccccaggggcttcctggcagtagaggagaattaggaccagtgggatccccaggcctaccaggtaaactgggttctctgggtagccctggcctccctggcttgcctgggccccctggacttcctggaatgaaaggtgacaggggtgtagtcggtgaaccgggtccaaagggtgaacagggtgcctctggtgaagaaggtgaagcaggagaaaggggggaacttggagatataggattacctggcccaaagggatctgcaggtaatcctggggaacctggcttgagagggcctgagggaagtcgggggcttcctggagtggaaggaccaagaggaccacctggaccccggggtgtgcagggagaacagggtgccaccggcctgcctggtgtccagggccctccgggtagagcaccgacagatcagcacattaagcaggtttgcatgagagtcatacaagaacattttgctgagatggctgccagtcttaagcgtccagactcaggtgccactgggcttcctggaaggcctggccctcctggtccccccggccctcctggagagaatggtttcccaggccagatgggaattcgtggccttccgggcattaagggtccccctggtgctcttggtttgaggggacctaaaggtgacttgggagaaaagggggagcgtggccctccaggaagaggtcccaacggtttgccaggagctataggtctcccaggtgacccaggccctgccagctatgggaaaaatggccgagacggtgagcgaggccccccagggctggcaggaattcctggagtgcctggacccccgggacctcctgggcttcccggtttctgtgagccagcctcctgcaccatgcaggctggtcagcgagcatttaacaaagggcctgacccttgaaaggcttactgctgcatggctgtctgcatgaaccacgcctggtgaaggagcctgggtgagaaacaccatccaaagctggggcaaagatgattaccttcagcatgattacaatgtattaccttcagtatgattacagaagtcctacttgacaatcacatatagaagaacggtgctattcagtaagttctctttcctttcccttggagggaagacagcagagtcatcagttaaaaaaaaaaaaaaagaaaaccaaacacctcccttgaacaaatttatactcctgttcccaggatcttgagctttagtgtgctatacctatgtgtcttatcgtgggccactgtgccaataaacaaaaacaactgtttggtttacctc

SEQ ID NO: 475 - DNA, 1420 bp, human
ggggctgctggagcttgggggctggtggcaggaacaagccctttccgaccccatggagctgtatgagacatccccctacttctaccaggaaccccgcttctatgatggggaaaactacctgcctgtccacctccagggcttcgaaccaccaggctacgagcggacggagctcaccctgagccccgaggccccagggccccttgaggacaaggggctggggacccccgagcactgtccaggccagtgcctgccgtgggcgtgtaaggtgtgtaagaggaagtcggtgtccgtggaccggcggcgggcggccacactgagggagaagcgcaggctcaagaaggtgaatgaggccttcgaggccctgaagagaagcaccctgctcaaccccaaccagcggctgcccaaggtggagatcctgcgcagtgccatccagtacatcgagcgcctccaggccctgctcagctccctcaaccaggaggagcgtgacctccgctaccggggcgggggcgggccccagccaggggtgcccagcgaatgcagctctcacagcgcctcctgcagtccagagtggggcagtgcactggagttcagcgccaacccaggggatcatctgctcacggctgaccctacagatgcccacaacctgcactccctcacctccatcgtggacagcatcacagtggaagatgtgtctgtggccttcccagatgaaaccatgcccaactgagattgtcttccaagccgggcatccttgcgagccccccaagctggccacagatgccactacttctgtagcaggggcctcctaagccaggctgccctgatgctaggaagccagctctggggtgccataggccagactatccccttcctcatccatgtaaggttaacccaccccccagcaagggactggacgccctcattcagctgcctccttagaggagagggcatccctttccagggaggtaaagcaggggaccagagcgccccctcgtgtatgccccagctcagggggcaaactcaggagcttcctttttatcataacgcggcctctaattccaccccccaagtgaaacggtttgagagacgccgtgccctgacctggacaagctgtgcacgtctcctgttctggtctcttcccgatgcagtggctggctggcctgccctgaattgagagagaagaagggggagaggaacagccctctgttcccaagtcctggggggccaaacttttgcagtgaatattgggaaccttccagtggttttatgttttgttttgtttcgtgtgttgtttgtaaagctgccatccgaccaaggtctcctgtgctgaagttgccggggacaggcagggaaaaggggttggggcctcttgggggtgatttcttttgttaacaaagcatcgtgtggttttgccggaatt

SEQ ID NO: 476 - DNA, 2340 bp, human
ttttatagtgtcagtcagtcaccccacagtctcctctctcttcttttctactgtgctatcctagaatcaaggatttcagcaacaatgcctctgttcaaactcccagctgaagagaaacaaattgatgatgcaatgcgcaactttgctgaaaaagtgtttgcctctgaagtcaaagatgaaggaggtcgtcaggagatttccccctttgatgtggatgagatctgtccgatttctcatcatgagatgcaagcacacatattccatctggagactctgtccacctccacagaagccaggagaaaaaagcgtttccaaggacggaagactgttaatttgtccattccactaagtgaaacatcttccaccaaactgtcccacattgatgaatacatttcctcatctccaacctaccagaccgtgcctgattttcagagagtgcagattactggtgactatgcctctggggttacagttgaagattttgaaattgtttgcaaaggtctgtatcgggcactatgcatacgtgagaaatacatgcagaagtcgtttcagaggttccctaaaaccccttccaaatacttgcggaacattgatggtgaggcttgggtagcaaatgagagcttctatccagtctttactcctcctgtgaagaagggagaggaccccttccgaacagacaaccttcctgaaaacctgggctatcacctcaaaatgaaggacggtgtagtttacgtctatcctaatgaagcagcagtcagcaaagatgagcctaagccacttccttacccaaatctggacaccttcttagacgatatgaattttttacttgctttaattgctcaaggacctgttaagacctatacccaccggcgcctgaagttcctctcctccaagttccaggtccatcagatgcttaacgagatggacgagttaaaggagctgaaaaacaacccccaccgagatttttataactgcaggaaggtggacacccatatccatgcagccgcttgcatgaaccagaaacatctgctgcgttttattaagaaatcttaccaaattgatgctgacagagtggtctatagcaccaaagagaagaatctgaccctaaaggaactttttgctaaattaaaaatgcatccttatgacctgactgttgattctctggatgttcatgctggacgccagaccttccagcgttttgataagttcaatgacaaatataatcctgtaggagcaagtgagctacgggacctctacttgaagacagacaattacattaatggggaatattttgccactatcatcaaggaggtaggtgcggacctggtggaggccaagtaccagcatgctgagccccgcctgtccatctatggccgcagtcctgatgagtggagcaaactctcctcctggttcgtctgcaatcgcatccactgccccaacatgacatggatgatccaggttcccaggatctatgatgtgttccgttccaagaatttccttccacattttggaaaaatgctggagaatattttcatgccagtgtttgaggccaccatcaacccccaggctgacccagaactcagtgtcttcctcaagcatatcactggctttgacagtgtggatgatgagtccaaacacagtggccacatgttctcctccaagagtcccaagccccaggagtggacattggaaaagaatccatcttacacttactatgcctactacatgtatgcaaacatcatggtgctcaacagcctgagaaaggaacgaggcatgaatacgtttctgttccgacctcacgtggagaagctggagccctcacccatctcatgacagcattcatgatagcagatgatatctctcatggcctaaatttaaaaaagagtcccgtgctacagtacttgtttttcttagcccaaattcccatcgccatgtcaccactaagtaacaatagcctatttctagagtatgccaaaaatccttttttggatttccttcagaaagggctaatgatctcactgtctacagatgacccaatgcaattccactttaccaaggagcccctaatggaagaatatgctattgctgcacaagtcttcaagctgagcacctgtgatatgtgcgaagtggcaaggaacagtgtcttgcagtgtggaatttctcatgaggagaaagtaaagtttctgggcgacaattaccttgaggaaggccctgctggaaatgatatccggaggacaaatgtagcccaaatccgcatggcctatcgctatgaaacctggtgttatgaactcaatttaattgctgagggtcttaaatcaacagaataaaaaaaagtaaacc

SEQ ID NO: 477 - DNA, 2427 bp, human; identical to SEQ ID NO: 471

SEQ ID NO: 478 - DNA, 626 bp, human
acatttgcttctgacacaactgtgttcactagcaacctcaaacagacaccatggtgcatctgactcctgaggagaagtctgccgttactgccctgtggggcaaggtgaacgtggatgaagttggtggtgaggccctgggcaggctgctggtggtctacccttggacccagaggttctttgagtcctttggggatctgtccactcctgatgctgttatgggcaaccctaaggtgaaggctcatggcaagaaagtgctcggtgcctttagtgatggcctggctcacctggacaacctcaagggcacctttgccacactgagtgagctgcactgtgacaagctgcacgtggatcctgagaacttcaggctcctgggcaacgtgctggtctgtgtgctggcccatcactttggcaaagaattcaccccaccagtgcaggctgcctatcagaaagtggtggctggtgtggctaatgccctggcccacaagtatcactaagctcgctttcttgctgtccaatttctattaaaggttcctttgttccctaagtccaactactaaactgggggatattatgaagggccttgagcatctggattctgcctaataaaaaacatttattttcattgc

SEQ ID NO: 479 - DNA, 399 bp, human
gaaggtgctttagtctgaagatggcggcctcagcagcgcgaggtgctgcggcgctgcgtagaagtatcaatcagccggttgcttttgtgagaagaattccttggactgcggcgtcgagtcagctgaaagaacactttgcacagttcggccatgtcagaaggtgcattttaccttttgacaaggagactggctttcacagaggtttgggttgggttcagttttcttcagaagaaggacttcggaatgcactacaacaggaaaatcatattatagatggagtaaaggtccaggttcacactagaaggccaaaacttccgcaaacatctgatgatgaaaagaaagatttttgagactgcagcctattaataaagttaacataactgagaaaaaaaaaaaaaa

SEQ ID NO: 480 - DNA, 2532 bp, human
gtcccaggttcaaggataaaaaccatcaggcccaagtgccatccatagtccatctccagagtcttcctccacaaactgggattcatccccgctgaaaaagcacaatctaacagcaagggaacaaaaaaaccatgctatcacataatactatgatgaagcagagaaaacagcaagcaacagccatcatgaaggaagtccatggaaatgatgttgatggcatggacctgggcaaaaaggtcagcatccccagagacatcatgttggaagaattatcccatctcagtaaccgtggtgccaggctatttaagatgcgtcaaagaagatctgacaaatacacatttgaaaatttccagtatcaatctagagcacaaataaatcacagtattgctatgcagaatgggaaagtggatggaagtaacttggaaggtggttcgcagcaagcccccttgactcctcccaacaccccagatccacgaagccctccaaatccagacaacattgctccaggatattctggaccactgaaggaaattcctcctgaaaaattcaacaccacagctgtccctaagtactatcaatctccctgggagcaagccattagcaatgatccggagcttttagaggctttatatcctaaacttttcaagcctgaaggaaaggcagaactgcctgattacaggagctttaacagggttgccacaccatttggaggttttgaaaaagcatcaagaatggttaaatttaaagttccagattttgagctactattgctaacagatcccaggtttatgtcctttgtcaatcccctttctggcagacggtcctttaataggactcctaagggatggatatctgagaatattcctatagtgataacaaccgaacctacagatgataccactgtaccagaatcagaagacctatgaaaagaaagttgtatgtgccacataaaactctgaatataaaagttgctgttctactattttaactactggcaaagcacttgcatttttcattagtagcaacaatagcaatttagtgattttccttttctgacattcaatttcaatctcagatcaaatactaataaacaattagaaatcttactttaaaaaacttataactcacttgtcttcattcataattttgttttcacctggtttaaagaatccagatattttactgcaaaagttcagatggaaaagtaattgacagcttcacctttgtctcattttatatgatttattacagtgtaagtttttcaagtggaatctagaatcaaaatacagggagagatatgaagacctattcagagtttcatctggggatgaaagctatggaagatgatgtacaaatgttattgatggagaaaatggttggtgtgtcctttctggtgaccatgagaaaataatatgtcttgatgaagtcttttcattagtcactcttagaattctaaagtgctttgcacttttcaatatgttttgaatcattaggtaatttattctggatgatattctccaaaattcaattcagttattatattcatttagcattaagtcaaggagactgagaatgactcaagggacgtcatagtaccatagttttaaggaccaaggtgtgcccagaattcaagtttcacaaatcccaatgctgtgcattgattatgttcaactttatgtgtgcattcttagaagagtaagaacaaataaagtacaccgtaatatacatataaatacattcatgtttgtgagagaaggaaagagtaagtaatttgaattggcagctttctttgctaaatctttaaattctgttaagatcctcaagtaactggggagtacatgctttaggacacaaacaaaaacaaagggcatgaaagtatctgaaagcaatgtagcacatatctatcgtaatatatgtaatatattgacataaaagacacaaactaatataaagttatagttatatcttaaaatataattgaagaagcatatgacatataacttatagaaatcagtatcaattcctcccatttcaattcagttaagacttctgtgatagatgtttatagcagagaagaaatgtctcatcaataggaaaactatcagataaagtttaggagataggaagaaggactgtgtgtagtaatgaaaataccaagttgcaacattacatgtttacaaaaaaaatctgtgtttgtagtgtggaagttggtgactgttttaatcatcatctagacttgttaagtagaaaaattttaaaaatttgcttatgaaaatataacccccagaaagtaacaatgacaaagtattatatttatatatattattgtagagaatttgtatatttttaaagatgtcttaagatatcttaattttatttataagttttggtgtttacctgttttaaaatgataatgttggcatctgtgataaactatcaatgaggctcccatcatgccattttttgttcattttaatctttaaaaaataaaaattaggcatattaaaaaaaaaaaaaaaaaaaaaaaaaaaa

SEQ ID NO: 481 - DNA, 6032 bp, human
gaattccgtgggcggaggtctgggatctcctggctgttgctgtcttctgctctcatcctgcaggtgggactctcagctgacaccatgagtagtgacactgaaatggaagtgttcggcatagctgctcctttcctccggaagtcagaaaaggagaggatcgaggctcagaaccagccctttgatgccaagacgtattgcttcgtggtggactcaaaggaagaatatgccaaggggaaaatcaagagttctcaggatgggaaggtcactgtggaaactgaggacaacaggaccctggtggtcaaaccagaggatgtgtacgccatgaacccccccaagttcgacaggatcgaagacatggccatgctgacgcacctgaatgagccagccgtgctgtacaacctgaaggaccgttacacatcttggatgatctatacctactcaggcctcttctgtgtcactgtcaacccctacaagtggctgccggtgtacaaccccgaggtggtggaaggctaccgaggcaaaaagcgccaggaggccccaccccacatcttctccatctctgacaacgcctatcagttcatgctgactgatcgtgaaaaccagtccattctgatcacgggagaatccggggcaggaaagactgtgaacaccaaacgggtcatccagtactttgcaacaattgcagctactggggacctggccaagaagaaggactccaaaatgaaggggactctggaagatcaaatcatcagtgccaatcccctgctggaggcctttgggaacgccaagactgtgaggaatgacaactcctcccgttttggcaagttcatccgaatccattttggaaccactgggaagctggcctctgcagatattgaaacttatcttctggaaaaatcaagagtcactttccagctgaaggctgaaagaagctaccacatcttctaccagattctttctaacaagaagcctgagctcatagagctgctgcttattacgaccaacccttacgactacccgttcattagccagggggagatcctggtggccagcatagatgatcgagaggagctgctggctacagacagcgccattgacatcctgggcttcaccccagaagagaaatctgggctctacaagctgacgggagccgtgatgcactacgggaacatgaagttcaagcagaagcagcgagaggagcaggccgagccggatggcacagaagtggctgacaaaacagcctatctgatgggcctgaactcttcggacctcctaaaagctttgtgctttcctagagtgaaagttgggaatgagtacgttaccaaaggtcaaactgtggatcaggttcaccatgctgtgaatgctctttcaaaatcagtttatgaaaagttgttcttgtggatggtcactcgcattaaccagcaactggatacgaagcttccaagacaacacttcattggtgttttggacattgcaggctttgaaatctttgagtataacagcctggagcagctgtgcatcaacttcaccaatgagaaactgcaacagtttttcaaccaccacatgttcgtgctggagcaggaggagtacaagaaggaaggcatcgagtggacgttcattgacttcgggatggacctggctgcctgcatcgagctcatcgagaagcctatgggcatcttctccatcctggaagaggagtgcatgttccccaaggcaacagacacctccttcaagaacaagctgtatgaccagcatcttggaaagtccaacaacttccagaagcccaaggtggtcaaaggcagggcagaggctcacttctcactgatccactatgcgggcaccgtggactacagtgtctcaggttggctggagaagaacaaggaccctctgaacgagactgtggttgggctgtaccagaagtcttccaacaggctcctggcacacctctatgccacgtttgccacggcggatgctgacagtggaaagaagaaagttgccaagaagaagggttcttccttccaaactgtctctgcccttttcagggaaaacctgaacaagctgatgtcaaatttaagaactactcaccctcattttgtgcgttgtataattcccaatgaaaccaaaactccaggggctatggaacacagccttgttctgcaccagctgcggtgtaacggtgtcctggagggcatccgcatctgcaggaaagggttcccaaacaggattctctatggagattttaaacaaagataccgagtgctgaatgccagtgcaatcctggagggacaattcattgacagcaagaaagcctgtgaaaagcttctggcatccattgatattgaccacactcagtacaaatttggacataccaaggtgttcttcaaggctggcttgctgggaaccctggaagagatgcgggatgaccgcctggccaaactaatcacccggacacaagctgtgtgcagagggttcctcatgcgtgtggaattccagaagatggtgcagaggagggagtccatcttctgcatccagtacaacattcgctcattcatgaacgtcaagcactggccctggatgaaactcttcttcaagatcaagcccctcctcaagagtgcggagactgagaaagagatggccaccatgaaggaagaattccagaaaaccaaagatgaactcgccaagtcggaggcaaagaggaaggagctagaggaaaaactggtgactctggtccaagagaaaaatgacctgcagctccaagtacaagctgaaagcgaaaatttgttggatgctgaggaaagatgcgatcagctgatcaaagccaaattccagctcgaggccaagatcaaggaggtgacagagagagctgaagatgaggaggagatcaatgctgagctgacggccaagaagaggaaactggaggatgaatgctcagagctcaagaaagacattgatgaccttgagttgaccctggccaaggttgagaaggagaagcatgccacggagaacaaggttaaaaaccttactgaggaactctccgggttagatgaaacaattgcaaagttaaccagagagaagaaggccctccaagaggcgcaccagcaggccttggatgacctccaagctgaagaagacaaagtcaattctttgaacaaaaccaagagcaaactggaacagcaagtggaagacctggaaagctccctagaacaagaaaagaagctccgcgtagacctggaaaggaacaaaaggaaattggaaggagacttgaagcttgctcaagagtccatattagatctggagaatgacaagcaacagctggacgaaaggctcaagaagaaagattttgaatattgtcaacttcaaagcaaagtggaagatgagcagacactgggcctccagtttcagaagaaaatcaaagagttgcaggctcgaattgaggagctggaagaggagatagaggcggagagggccacccgcgcgaagacagagaaacagcgcagcgactatgcccgggagctggaggagctgagcgagcggctggaggaggcgggaggcgtcacctccacgcagatagagctcaacaagaagcgggaggctgagttcctgaagctgcgcagggacctggaggaggccacactgcagcacgaagccatggtggccacgctgaggaagaagcatgcggatagtgtggccgagcttggggagcagattgacaacctgcagcgggtcaagcagaagctggagaaggagaagagcgagttcaagctggagatcgatgacctctccagcagcatggagagtgtgtcgaaatctaaggcaaatctggaaaaaatctgccgaaccctggaggatcagttaagtgaggccaggggcaagaatgaggaaattcagaggagcctgagcgagctgaccacacagaagtctcgtttgcagaccgaggctggtgagctgagtcgtcagctggaagaaaaagaaagcatagtatcccaactttccaggagcaagcaagcctttacccagcaaacagaagagctcaagaggcagctggaggaagagaacaaggccaagaacgccctggcgcacgccctgcagtcctcccgccacgactgtgacctgctgcgggaacagtatgaggaggagcaggaaggcaaagctgagctgcagagggcgctgtccaaggccaatagtgaggttgcccagtggagaaccaaatacgagacggacgccatccagcgcacagaagagctggaggaggcccaagaaaaacttgctcagcgccttcaagattccgaggaacaggttgaggcagtgaatgctaaatgtgcttcactggagaagaccaagcagaggctgcaaggagaggtggaggatctgatggttgatgttgaaagagccaattccttggccgccgctctggacaagaagcagaggaactttgacaaggtgttggcagagtggaagacaaagtgtgaggagagccaagcagagctggaggcatccctgaaggagtcccgctccttgagcactgagctcttcaaactgaaaaatgcctacgaggaagccttagatcaacttgaaactgtgaaacgggaaaataagaacttagagcaggagatagcagatctcacagaacaaattgctgaaaatggcaaaaccatccatgaactggagaaatcaagaaagcagattgagctggaaaaggctgatatccagctggctctcgaggaagcagaggctgctcttgagcatgaagaagccaagatcctccgaatccagcttgaattgacacaagtgaaatcagaaattgatagaaagattgccgagaaggatgaagagatcgagcagctgaagaggaactaccagagaacagtggaaaccatgcagagcgccctggacgccgaggtgcggagcaggaatgaagccatccggctcaagaagaagatggagggggacctgaatgaaatcgagatccagctgagccacgccaaccgccaggcggcggagaccctcaaacacctcaggagtgtccagggacagctgaaggatacgcagctccacctggatgatgccctccgaggccaggaggacctgaaggagcagctggcgattgtggagcgcagagccaacctgctgcaggccgaggtggaggagctgcgggctactctggagcagacggagagggcccggaaactggcggaacaggagctcctggactccaacgagagggtgcagctgctgcatacccagaacaccagcctcatccacaccaagaagaagctggagacagacctcatgcagctccagagtgaggtagaagatgccagcagggatgcaaggaacgctgaggagaaggccaagaaggccatcacggacgctgccatgatggcggaggagctgaagaaggagcaggacaccagcgcccaccttgagcggatgaagaagaacctggaacagacggtgaaggacctgcagcatcgtctagatgaggccgagcagctggcgctgaagggcgggaagaagcagatccagaaactggagaccaggatccgagagctggagtttgaacttgagggagagcagaagaagaacacagagtctgttaagggcctgaggaagtatgagcggagggtcaaggagctgacgtaccagagtgaagaggacaggaagaatgtgctgagattgcaggatctggtggataaactgcaagtgaaagtcaagtcctacaagaggcaggcggaggaggctgatgaacaagccaatgctcatctcaccaaattccggaaagctcagcatgagctggaggaggccgaggaacgtgcggatatcgcagaatctcaagtcaacaagctccgcgctaagactcgagacttcacctccagcaggatggtggtccacgagagtgaagagtgagccagcccttctggagcaggagcaggacagaagatatgcaaaatgtatattttcttgattcctgaccattgatacttaatgtccatgtgactctttttcacatgcaataaactttgctttgtttc

SEQ ID NO: 482 - DNA, 1294 bp, human
gtttttgagtccatcacccagttcagatcgagtcagaggccaaggaggagaacatgatgatggacctttttgaaactggctcctatttcttctacttggatggggaaaatgttactctgcagccattagaagtggcagaaggctctcctttgtatccagggagtgatggtaccttgtccccctgccaggaccaaatgcccccggaagcggggagcgacagcagcggagaggaacatgtcctggcgcccccgggcctgcagcctccacactgccccggccagtgtctgatctgggcttgcaagacctgcaagagaaaatctgcccccactgaccggcgaaaagccgccaccctgcgcgaaaggaggaggctaaagaaaatcaacgaggccttcgaggcactgaagcggcgaactgtggccaaccccaaccagaggctgcccaaggtggagattctgcggagcgccatcagctatattgagcggctgcaggacctgctgcaccggctggatcagcaggagaagatgcaggagctgggggtggaccccttcagctacagacccaaacaagaaaatcttgagggtgcggatttcctgcgcacctgcagctcccagtggccaagtgtttccgatcattccagggggctcgtgataacggctaaggaaggaggagcaagtattgattcgtcagcctcgagtagccttcgatgcctttcttccatcgtggacagtatttcctcggaggaacgcaaactcccctgcgtggaggaagtggtggagaagtaactgagcctgcgcttgagaccttctccacgcagcaggaagatcccaccgacccttcctggcctaatcctttagattaggtcacattacattaacatttaggaacccagaccgaaaagttgctgaaagggaaggagacacattcacaaagaaaagttgcgaaaattgcgaaatctgttgtgcacgctcaaatgaaaacgcctttcggctttgggcttttatttttttggaactgcgagtggcttaggtctagcctcattttgtttttgtttggttggttttatactatattaacttttattacggtgatccttttgtgccatgttcaaaagaagttcattcctgtctgaagtgggaaagttgcatttaatgttaggggtatttaatgtatttttgtaaatagtttagcactttctttttttacgtaaacctgaaatatattttaaatgtggaatgatgtatataaaatgtgcgaggatcctggtattgtaatattaaaaagaagtttctatatg

SEQ ID NO: 483 - DNA, 1772 bp, human
ccaccctggccccccagccagtccagcaatgatggaaaaaaacacctccgagggccctgcctgcagtccagaggagaccgcatctgaatctgccaaggtgcccacagcagagcctcccggagaagtggcagtatcagagtccaccagagaagagcaggtgcccaagccgcacggccctgccccacaggcccctacagcctccacagccactaagcctgcacccccaagtgaagatgtccccagtgccccactgctgctgaccctggatgatgtgagcagcagctctgtgactgtgagctgggagcccccagagaggctggggaggctgggcctccagggctatgtgctggagctctgcagagagggagcctcggagtgggtgcctgtgagtgcccggcccatgatggtgacccagcagactgtgcggaacctggctctgggagacaagttcctcctgcgcgtgtctgcagtgagttctgcaggggctggcccgccggccatgctggaccagcccatccacatccgagagaacattgaggcccccaagatccgtgtcccccgccacctccgtcagacctacatccgccaggtgggagagacggtcaacctgcaaatccccttccaggggaagcctaagcctcaggccacatggacccacaacggccatgccctggacagccagcgggtgagcatgcgcaccggggaccaggactccatcctcttcattcgctcggcccagcgctccgactctggccgctacgagctcactgtgcgcgtggaagacctggaggccaaggcagtcattgacatcctggtgattgagaaacctggaccccccagcagcatcaggctcctggacgtctggggctgcaatgctgctcttcagtggacgccaccccaggacacaggcaacacagagctcctgggctacatggtgcagaaggcagacaaaaagacagggcaatggttcacagtgctggagcgctaccacccaaccacctgcaccatctctgacctcatcatcggcaactcgtactccttccgggtcttctcagaaaacctgtgtggactcagcacctcggccaccgtcaccaaggagctcgcccacatccagaaggcagatattgctgccaaacctaaagggtttattgagcgagacttctcagaagccccctcattcacccagcccctggctgaccacacctccacccctggctacagcacccagttgttctgcagtgtcgagcttcaccaagccaagatcatctggatgaaaaacaagatggagatccagggcaaccccaaataccgcgccctctctgagcaaggcgtctgcaccctagagatccggaaacccagcccctttgattctggggtctacacctgcaaggccataaatgtgctgggggaggcatctgtggactgccggctggaggtcaaagcctcagccgcacactgaagagtcacgggaggaggctgtgatgagagccaggtgctgcagcctgaggggccaggtccaccaggcctacagtcaaactccagagatgcccaagacccccgcttccatagcgacggctgatggaaccgcccctggtacctgctggcctcccttccccagaggctggtgtccagaactcaggaatgggcctggtaggccccaggccagactaactgggctcaaggggtgctggaaggcgcagagattggagtgccctgcggagttgcactctgggtgggaagcactcaaataaagatgcgtggtgttaacagtg

SEQ ID NO: 484 - DNA, 1667 bp, human
aagcacaggccaccactctgccctggtccacacaagctccggtagcccatggagccctggcctctcctcctgctctttagcctttgctcagctggcctcgtcctgggctccgaacatgagacccgtctggtggcaaagctatttaaagactacagcagcgtggtgcggccagtggaagaccaccgccaggtcgtggaggtcaccgtgggcctgcagctgatacagctcatcaatgtggatgaagtaaatcagatcgtgacaaccaatgtgcgtctgaaacagcaatgggtggattacaacctaaaatggaatccagatgactatggcggtgtgaaaaaaattcacattccttcagaaaagatctggcgcccagaccttgttctctataacaatgcagatggtgactttgctattgtcaagttcaccaaagtgctcctgcagtacactggccacatcacgtggacacctccagccatctttaaaagctactgtgagatcatcgtcacccactttccctttgatgaacagaactgcagcatgaagctgggcacctggacctacgacggctctgtcgtggccatcaacccggaaagcgaccagccagacctgagcaacttcatggagagcggggagtgggtgatcaaggagtcccggggctggaagcactccgtgacctattcctgctgccccgacaccccctacctggacatcacctaccacttcgtcatgcagcgcctgcccctctacttcatcgtcaacgtcatcatcccctgcctgctcttctccttcttaactggcctggtattctacctgcccacagactcaggggagaagatgactctgagcatctctgtcttactgtctttgactgtgttccttctggtcatcgtggagctgatcccctccacgtccagtgctgtgcccttgattggaaaatacatgctgttcaccatggtgttcgtcattgcctccatcatcatcactgtcatcgtcatcaacacacaccaccgctcacccagcacccatgtcatgcccaactgggtgcggaaggtttttatcgacactatcccaaatatcatgtttttctccacaatgaaaagaccatccagagaaaagcaagacaaaaagatttttacagaagacattgatatctctgacatttctggaaagccagggcctccacccatgggcttccactctcccctgatcaaacaccccgaggtgaaaagtgccatcgagggcatcaagtacatcgcagagaccatgaagtcagaccaggagtctaacaatgcggcggcagagtggaagtacgttgcaatggtgatggaccacatactcctcggagtcttcatgcttgtttgcatcatcggaaccctagccgtgtttgcaggtcgactcattgaattaaatcagcaaggatgagcagaaaatgagctgagcttagctctgccctggaacctaccagagcagagaagggcaggagaggaagatttgtctacttgctccactcgcacttatcaaacgtgttatattccatacttattattgatgataagatttacctttatgtaagtttatggccttgaagtgttttcatattgcttctccctttagttctgctgtctccctgaagagtgaaccctctttagtaaatgaaactaatcact

SEQ ID NO: 485 - DNA, 1540 bp, human
cctcggcagtcctagcgggtgcgaaggggaccaaataaggcaaggtggcagaccgggccccccacccctgcccccggctgctccaactgaccctgtccatcagcgttctataaagcggccctcctggagccagccacccagagcccgctgccgccggagccgagccgacccgccccgccgacgaaccccctgaagctgtgccaagatgtgtgacgacgaggagaccaccgccctggtgtgcgacaacggctctgggctggtgaaggccggctttgcgggcgatgacgcgccccgcgctgtcttcccgtccatcgtgggccgcccgcggcaccagggagttatggtgggtatgggtcagaaggactcctacgtaggtgatgaagcccagagcaagagaggcatcctgaccctgaagtatcccatcgagcatggtatcatcaccaactgggacgacatggagaagatctggcaccacaccttctacaatgagctccgtgtggctcccgaggagcaccccaccctgctcacagaggccccgctgaaccccaaggccaaccgggagaagatgactcagatcatgtttgagaccttcaatgtccctgccatgtacgtggccatccaggcagtgctatccctgtatgcttctggccgtaccacaggcattgttctggactctggggatggtgtaactcacaatgtccccatctatgagggctacgctttgccccatgccatcatgcgtctggatctggctggtcgggacctcactgactacctcatgaagatcctcactgagcgtggctactcctttgtcaccactgctgaacgtgaaattgtccgtgacattaaagagaagctgtgctatgtcgccctggattttgagaatgagatggccacagctgcctcttcctcctccctggagaagagctatgaactgcctgatggccaagtcatcactattggcaatgagcgcttccgctgtcctgagacactcttccagccctccttcattggtatggaatctgctggcatccatgaaacaacttacaatagcatcatgaagtgtgacattgatatccgcaaggacctgtatgccaacaatgtcttatctggaggcaccactatgtaccctggtattgctgatcgtatgcagaaggaaatcactgctctggctcctagcaccatgaagattaagattattgctccccctgagcgtaaatactctgtctggattgggggctccatcctggcctctctgtccaccttccagcaaatgtggattagcaagcaagagtacgatgaggcaggcccatccattgtccaccgcaaatgcttctaagatgccttctctctccatctaccttccagtcaggatgacggtattatgcttcttggagtcttccaaaccaccttccctcatctttcatcaatcattgtacagtttgtttacacacgtgcaatttgtttgtgcttctaatatttattgctttataaataaaccagaccaggacttgcaacctaaaaaaaaaaaaaaaaaaaa

SEQ ID NO: 486 - DNA, 2357 bp, human
tccggaccctttcttcccatcctttgctcctaggattttacatgttgcctgcaaagggagtcaaacttagggggcaggcaaacaaacgagttctttccagcctctgtaaccggatcgctagagcgaaataaactcgcacaagtgtccagagatcgtagccagacagccagcctgcgcttgaacgaacttttaagtgaggctgcaagagccgccgggatgtagattttagttcgtggccaagcacaactacgacgatcctgtccctgccccaccccatccccaagaatgcatggaggaaggagagaggaagcaggtgagggccgcctgcatttctgcacgtcggcgccggttagaaaccctgcagttttgagagagaagaagaggagatggaggggccaggagccacgactcccgggagagcgcagggaggggcgtgggtgccccttcgcccacctccgcccccgtcacctcgacagctgtcccgctcttggaattcattggcttcctctacccggcctcccaaacaccaccccaatctagtttagccccccgccccaccctcgctgacctaataaggccatgcaagtgtgcgggggagctacataaaagcgcgggctcgcgccgactctgcaccacgcaggggaagagaaagcaggagccgtccagcacggaggaaggcgaccatggccaaggagtggggctacgccagtcacaacggtcctgaccactggcatgaacttttcccaaatgccaagggggaaaaccagtcgcccgttgagctgcatactaaagacatcaggcatgacccttctctgcagccatggtctgtgtcttatgatggtggctctgccaagaccatcctgaataatgggaagacctgccgagttgtatttgatgatacttatgataggtcaatgctgagagggggtcctctccctggaccctaccgacttcgccagtttcatcttcactggggctcttcggatgatcatggctctgagcacaccgtggatggagtcaagtatgcagcggagcttcatttggttcactggaacccgaagtataacacttttaaagaagccctgaagcagcgcgatgggatcgctgtgattggcatttttctgaagataggacatgagaatggcgagttccagattttccttgatgcattggacaagattaagacaaagggcaaggaggcgcccttcacaaagtttgacccatcctgcctgttcccggcatgccgggactactggacctaccagggctcattcaccacgccgccctgcgaggaatgcattgtgtggctgctgctgaaggagcccatgaccgtgagctctgaccagatggccaagctgcggagcctcctctccagtgctgagaacgagcccccagtgcctcttgtgagcaactggcgacctccacagcctatcaataacagggtggtgagagcttccttcaaatgaggctgctggatcttgccctcttcaggaaaggaaacctaccattggagagcttggttccttgcctccttctggtgctcttactccaagtctatttcatttttccacactgagcaatgaatgtgagagatgtggtcaccaagatctaagttacttgttgaaagaaagttactttcgacaagatctaatatgaaagcatagatttcacatttgatctctgtaataatcatctttcctataaaagtagcatttttggtaaagtttcaaagaagaagaaacagagatggaagagtaaagatatttttaaaatggctagctattgggcaccagtttttctgttatctaaaatttcacacaacttcatgtttttatttttatattatgagttgtccatcttaaagaaatatgagtaattctacatgtagtagaggtgtatgaagatcatataacaattaaacataagccagaaattaaaatgactatagacagcaagaattgagctaataatatgttttaactcttaacaccagcaagaagtcagtcatttattgaagttttagctactaagattacttggttttgattaccagtgaaaagaaaacacaatacaatcaggagttttcaaatttttgattcagtatttgaatttcttcttcataaatgtagttggaatttatcctagtatttttctttacctgaaggagggccatttatttttaatttcactacatttttctttgcatgattattaaaataaaaactgcctctgttgtgtttctcactggaggctggaatgaatgatcactagaacacaaaagagtgaatgatgacacttgaagtcaaagcagttgtactgatcaccagaaccaataaagacataaatggaaaacgttg

SEQ ID NO: 487 - DNA, 2665 bp, human
agaaattcaggagacacagacaagttcttccacgatgtcgtacagacgagaactagagaaataccgtgacctggatgaagatgaaatccttggagccctaacagaggaagagctgaggaccctggaaaatgagctggatgagctggaccctgataatgcactgctgcctgcaggcctgaggcagaaggatcagaccaccaaggcgcccacgggcccctttaaaagagaggagctcttggatcacttggaaaagcaagcaaaggagtttaaggaccgagaagatctggtcccctacacaggggaaaaacgaggaaaggtctgggttcctaagcagaagccactggatcctgtgctggaaagtgtgacgctggaaccggagctggaggaagccttggcaaatgcttcagatgcagaactctgtgacattgcagcgatcctgggcatgcacacgctcatgagtaaccagcagtactaccaggccctgagcagcagctccatcatgaacaaggaggggctcaacagcgtgattaaacccacacaatacaagcctgtgcccgacgaagaaccaaattcaacagacgtagaggaaacgctggaacggataaagaacaacgacccaaaacttgaagaagttaacctcaataatatccggaatatccccatccccaccctcaaggcatatgcagaagccctgaaagaaaactcatatgtgaagaagttcagcatcgtggggacacggagtaatgaccccgtggcgtatgcccttgctgagatgctcaaggagaacaaggtgttgaagacactgaatgtggaatccaacttcatttctggagctgggattctgcgcctggtagaagccctcccatacaacacttctctggtggaaatgaaaattgacaaccagagccagcccctgggcaacaaagtggaaatggagattgtgagcatgttggaaaaaaacgcaacacttctcaaattcggctaccactttacccagcaaggaccccggcttcgggcatccaacgcaatgatgaacaacaatgaccttgtgaggaagaggaggcttgcggacctgactgggcccatcattcccaagtgccggagtggtgtctagtgtgtggcggtggagtccatgcctttgaactggatgtgttctattgatgacctgtgctctgcaggggaaaccagaaggcaaaatgctggcagcatgaaacccttttgtggttcagttctttatgcactaaggttttaggttgactagtggttgtagttgaaaattttataaaataccgttaatgtgaagtttttctttagtcacagaagttgaatctggttattatttaaaaactagaagcccccaaaccagcagatcttactgaagatgatgttccagcagcagcgacttagccccaggagcccagtttcaatggccttgctgtgtggtgtttcaagtgcatttaaaatgtgtgacacagaaacggcacactcttccacatgcttttgaagtattataaaacactttattacaaatttgtcttagctattagcaaataaaactgattatcattctttattaaccctccttggaattttgaaaacctcgattaaagttgccaaattgattactggatccagaacacaattttcccctcagaacagatagacagactgaagccactgaactctgccaggagtcaacatgagattccttttgctggatatgcagaaatgataggaaaaaaaccaatggtgaaatttcaagtttcaaaaaccaacctttcattaccaatcccaggcaacaaacatgtccctgagtgttctttaagaacatttgggatttatgtacaatttaatactggagttagaactttttccttattgaatgccaaccttatgatggatgtgaaaatctacggccaaatacttttgaaaacacctttctatattgcacagtgggcaaatggcttatgtgaggtaagacactagagggataaatttccagatcaacatggctatggtatttagtaatggcccagcttagagacttcagctactgatctcatcacttattagacaaattgctgctgaccttacgcctgtatattaagcctccgcaggatgccggacaatggtgaagaaactccagatatcaaggaattgggaaatcctggccaaaccaccccaagatgattacactgaaatgtagtattagtactgctgccagatctctttttaacatcatgtgcgtctcttgggatccagcaaaagtgttaagccacaatgcccttgtgccttttaatataccacagtgccagttaaactaatatttttgtttgttgcttttgggagttattttcattagtgatttcagcaaatctcatgataaaggacaaggtcaagaactccagagcactgagcagagaggctggtgatgaaaaggtgaaggcctgcgcactgaactgtaaggcagtgggcagtacagggtaactggaggcggggccagggcctcagcgctatggaagagtgtccactgaggctgcacatggcccaggagtggcaccatgttgcagggacaaccatccccatttggcttctccttaaaacacaattgcagctgcattctgcatcgctgaaaactgcaatataatattaaatctgttggtcg

SEQ ID NO: 488 - DNA, 1973 bp, human
ctggcagtgagctggccgcggccttggctgagaggccttaaccccgccgggcggccgcgccctgcatgcgagttgggccgcgggcggggttggagcctactcggggcgactgcgatggacgccttagaaggagagagctttgcgctgtctttctcctccgcctctgatgcagaatttgatgctgtggttggatatttagaggacattatcatggatgacgagttccagttattacagagaaatttcatggacaagtactacctggagtttgaagacacagaagagaataaactcatctacacacctatttttaatgaatacatttctttggtagaaaaatacattgaagaacagctgctgcagcggattcctgagttcaacatggcagccttcaccacaacattacagcaccataaggatgaagtggctggtgacatattcgacatgctgctcaccttcacagattttctggcttttaaagaaatgtttttggactacagagcagaaaaagaaggccgaggactggacttaagcagtggcttagtggtgacttcattgtgcaaatcatcttctctgccagcttcccagaacaatctgcggcactaggtcctacctccagccaatgaatgggatcattctggatgtcaccagcccaataggctcagctcatgatgacagaacacatcttggaaagactgactctgttatgtaactcttcatttatgttaagtattaataggtcaaaaccaaaatgacctaaccctcctggacctatttatcctgaaacaccttcttgtattcattaaccatagtactcctccccacctcaagtagacacctctctcaggagcttctgagtcagacgcctctggagcgagccctatgtcaggcactccacctggggggcccttccccagcatacctgctggtgtgtaagtgtggactaacccgccgccaccaccctctgttccagcaggctctgcatgaatctttgtgcacttgcacctctttttcacatgggccacagtttcagtacttcagcctcagtggggttcctgatgtttatctagggtgttactcaagcccagtttgagattttggagtctcctgtgatcacatcttgtctcggctgtaggaatcaacagaaggagacgtcctctacataaaagctccatgtgaaaagctactcctagtcttaacatttgcagtccttgtgtcactgtcttctggtcctgatgtagtcccactgtttctagaagtctcttttaagcattatttttgaaaaaaaaaatatttttatagatgaatactcaggctaacctagtggatgtgatcttggaacttccatgattatccacttaaagatcaaagtattatatgctgtgtgctttttaggtgtttgttagtactgtgaaggcaaaaatgctttctacattgacattcattcctattttactgggcacctatgaatgtatgctgtgtgctagaaatagactaaaacatattcctatagcatgttagtgtgtttgcatgtttgctgaaaatcctttgtgtataaaccagtttgtaaggttctctgggttaggtagggactctgcagtttcttcctgtcaaaatctctcctaccaagatggtgttccactgtccagcccagcatgagtagcaggtagagcacagctttactggctgtttgtatgctttggtttagtgcaatgtgtggtagattacttatcagaaaacatatatgtcatctctagaacgaagaaaaagcatagtagttcaattcccagtgtgtccctttgattttttttttttaatagtaaaaataagaatctgtactgacttttcacttggccattctggttttaaaggacaagctacaagctctgtgtttctgtactgatgtgtcacttattaaatacttttgtaccatgagtaaaacttcaggtgtttcgcaagaaccaccattctca

SEQ ID NO: 489 - DNA, 2346 bp, human
ggcacgagggttaggccaacagggaagcgcggagccgcagatctggtccgtcgctcgcctgggtgcctggagctgagctgcggcaaggcccggctcctgttcgaccgcccgaggggtgtgcgtgtgcgcgttgcggagggtgcgctcagagggccgcgtcgtggctgcagcggctgctgccgccgcaggggatctaatatcacctacctgtccctgtcactcttgacacttctctgtcagggctgccgcgtggggggggggcgggcagagcgcggtcggcgttagctttccttattggaggggttcttgggggagggagggagagaagaagggggtctttgcccactcttgtttcgctttggagcttggaagcctgctccctaaagacgctctgagtggtgcccttctgcccacatcccatgtcttcgtttgcccgctgactttccgtctccggactttttcgcttgagccttccggaggagacgggggcagcttggcttgagaactcggcgggggttgcgtcccctggctctccccgcagcggggaaactccgcgcctagagcgcgacccggagcgggcagcggcggctacgggggctcggcggggcagtagccaaggactagtagagcgtcgcgctccctcgtccatgaactgcatgaaaggcccgcttcacttggagcaccgagcagcggggaccaagctgtcggccgtctcctcatcttcctgtcaccatccccagccgttagccatggcttcggttctggctcccggtcagccccggtcgctggactcctccaagcacaggctggaggtgcacaccatctccgacacctccagcccggaggccgcagagaaagataaaagccagcaggggaagaatgaggacgtgggcgccgaggacccgtctaagaagaagcggcaaaggcggcagcggactcactttaccagccagcagctccaggagctggaggccactttccagaggaaccgctacccggacatgtccacacgcgaagaaatcgctgtgtggaccaaccttacggaagcccgagtccgggtttggttcaagaatcgtcgggccaaatggagaaagagggagcgcaaccagcaggccgagctatgcaagaatggcttcgggccgcagttcaatgggctcatgcagccctacgacgacatgtacccaggctattcctacaacaactgggccgccaagggccttacatccgcctccctatccaccaagagcttccccttcttcaactctatgaacgtcaaccccctgtcatcacagagcatgttttccccacccaactctatctcgtccatgagcatgtcgtccagcatggtgccctcagcagtgacaggcgtcccgggctccagtctcaacagcctgaataacttgaacaacctgagtagcccgtcgctgaattccgcggtgccgacgcctgcctgtccttacgcgccgccgactcctccgtatgtttatagggacacgtgtaactcgagcctggccagcctgagactgaaagcaaagcagcactccagcttcggctacgccagcgtgcagaacccggcctccaacctgagtgcttgccagtatgcagtggaccggcccgtgtgagccgcacccacagcgccgggatcctaggaccttgccggatggggcaactccgcccttgaaagactgggaattatgctagaaggtcgtgggcactaaagaaagggagagaaagagaagctatatagagaaaaggaaaccactgaatcaaagagagagctcctttgatttcaaagggatgtcctcagtgtctgacatctttcactacaagtatttctaacagttgcaaggacacatacacaaacaaatgtttgactggatatgacattttaacattactataagcttgttattttttaagtttagcattgttaacatttaaatgactgaaaggatgtatatatatcgaaatgtcaaattaattttataaaagcagttgttagtaatatcacaacagtgtttttaaaggttaggctttaaaataaagcatgttatacagaagcgattaggatttttcgcttgcgagcaagggagtgtatatactaaatgccacactgtatgtttctaacatattattattattataaaaaatgtgtgaatatcagttttagaatagtttctctggtggatgcaatgatgtttctgaaactgctatgtacaacctaccctgtgtataacatttcgtacaatattattgttttacttttcagcaaatatgaaacaaatgtgttttatttcatgggagtaaaatatactgcatacaaaaaaaaaaaaaaaaaaaaaaaaa

SEQ ID NO: 490 - DNA, 6008 bp, human; identical to SEQ ID NO: 473

SEQ ID NO: 491 - DNA, 872 bp, human
ctgctttctgcattcttctctccacatgcctctctgtacttacagccccaatggcccccaaaaagccagagcccaagaaggatgatgccaaggcagcccccaaggcagctccagctcccgcacctccccctgagcctgagcgccctaaggaggtcgagtttgatgcttccaagatcaagattgagttcacacctgagcagattgaagagttcaaggaagccttcatgctgttcgaccgcacacccaagtgtgagatgaagatcacctacgggcagtgtggggatgtcctgcgggcgctgggccagaaccccacacaggcagaagtgctccgtgtcctggggaagccaagacaggaagagctcaataccaagatgatggactttgaaactttcctgcctatgctccagcacatttccaagaacaaggacacaggcacctatgaggacttcgtggaggggctgcgggtcttcgacaaggagggcaatggcactgtcatgggtgctgagcttcgccacgtgctggccacgctgggtgagaggctgacagaagacgaagtggagaagttgatggctgggcaagaggactccaatggctgcatcaactatgaagcatttgtgaagcacatcatgtccagctaaacctcgtgcccagaagccaggaaggctgtgcaggacgtctcatctcccatgtgtgatgctgacaccaagcggcctggagtcgtgggaaggaggggagccttaccaagactcctgcaaaaacccttggacctctccacgtggttgccgtctctggcccctctcaggctgtgcttacctgtgacagcagctctgtccccaccccatgggcctcatgaataaaggcttcttgccggc

SEQ ID NO: 492 - DNA, 6008 bp, human; identical to SEQ ID NO: 473

SEQ ID NO: 493 - DNA, 886 bp, human
gttctcaataccgggagaggcacagagctatttcagccacatgaaaagcatcggaattgagatcgcagctcagaggacaccgggcgccccttccaccttccaaggagctttgtattcttgcatctggctgcctgggacttcccttaggcagtaaacaaatacataaagcagggataagactgcatgaatatgtcgaaacagccagtttccaatgttagagccatccaggcaaatatcaatattccaatgggagcctttcggccaggagcaggtcaaccccccagaagaaaagaatgtactcctgaagtggaggagggtgttcctcccacctcggatgaggagaagaagccaattccaggagcgaagaaacttccaggacctgcagtcaatctatcggaaatccagaatattaaaagtgaactaaaatatgtccccaaagctgaacagtagtaggaagaaaaaaggattgatgtgaagaaataaagaggcagaagatggattcaatagctcactaaaattttatatatttgtatgatgattgtgaacctcctgaatgcctgagactctagcagaaatggcctgtttgtacatttatatctcttccttctagttggctgtatttcttactttatcttcatttttggcacctcacagaacaaattagcccataaattcaacacctggagggtgtggttttgaggagggatatgattttatggagaatgatatggcaatgtgcctaacgattttgatgaaaagtttcccaagctacttcctacagtattttggtcaatatttggaatgcgttttagttcttcaccttttaaattatgtcactaaactttgtatgagttcaaataaatatttgactaaatgtaaaatgtga

SEQ ID NO: 494 - DNA, 885 bp, human
ggagtccacacaggcagacttgaccttgaccagatagtcttcaagatgccaaactggggcggaggcgcaaaatgtggagcctgtgaaaagaccgtctaccatgcagaagaaatccagtgcaatggaaggagtttccacaagacgtgtttccactgcatggcctgcaggaaggctcttgacagcacgacagtcgcggctcatgagtcggagatctactgcaaggtgtgctatgggcgcagatatggccccaaagggatcgggtatggacaaggcgctggctgtctcagcacagacacgggcgagcatctcggcctgcagttccaacagtccccaaagccggcacgctcagttaccaccagcaacccttccaaattcactgcgaagtttggagagtccgagaagtgccctcgatgtggcaagtcagtctatgctgctgagaaggttatgggaggtggcaagccttggcacaagacctgtttccgctgtgccatctgtgggaagagtctggagtccacaaatgtcactgacaaagatggggaactttattgcaaagtttgctatgccaaaaattttggccccacgggtattgggtttggaggccttacacaacaagtggaaaagaaagaatgaagaggtgcgccgtttctcagattttttgcgagcctaaaacacttgccaagtaatcctgcacagatcgatacctttccccaaatagcctctcctttgtagtcgtacattatgtgtttctcctcagaagtgatcaggtctttactgaatgttagaagaggcctttggaagaaaattatgtaaagtttaatctataacaaatgctttattatttataatgcttggaatgggagaggcaataaataaatgttttagtgc

SEQ ID NO: 495 - DNA, 1540 bp, human; identical to SEQ ID NO: 485

SEQ ID NO: 496 - DNA, 2357 bp, human; identical to SEQ ID NO: 486

SEQ ID NO: 497 - DNA, 2024 bp, human
cgggacgcagcaaagagaggagagaccccaagtcagaaggagtgagaaccctgacccctaatcccactgcatccagccaataggagcccagccaccatggcggagctgcaggaggtgcagatcacagaggagaagccactgttgccaggacagacgcctgaggcggccaagactcactctgtggagacaccatacggctctgtcactttcactgtctatggcacccccaaacccaaacgcccagcgatccttacctaccacgatgtgggactcaactataaatcttgcttccagccactgtttcagttcgaggacatgcaggaaatcattcagaactttgtgcgggttcatgtggatgcccctggaatggaagagggagcccctgtgttccctttgggatatcagtacccatctctggaccagcttgcagacatgatcccttgcgtcctgcagtacctaaatttctctacaataattggagttggtgttggagctggagcctacatcctggcgagatatgctcttaaccacccggacactgttgaaggtcttgtcctcatcaacattgatcccaatgccaagggttggatggattgggcagcccacaagctaacaggcctcacctcttccattccggagatgatccttggacatcttttcagccaggaagagctctctggaaattctgagttgatacaaaagtacagaaatatcattacacatgcacccaacctggataacattgaattgtactggaacagctacaacaaccgccgagacctgaactttgagcgtggaggtgatatcaccctcaggtgtcctgtgatgctggtggtaggagaccaagcacctcatgaagatgcagtggtggaatgtaactcaaaactggaccccacccagacctcgttcctcaagatggctgactccggaggtcagccccagctgactcagccaggcaagctgaccgaggccttcaagtacttcctgcaaggcatgggctacatggcctcatcctgcatgactcgcctgtcccggtctcgtacagcctctctgaccagtgcagcatccgttgatggcaaccggtcccgctctcgcaccctgtcccagagcagcgagtctggaactctttcttcggggcccccggggcacaccatggaggtctcctgttgaatggcccttgttgccctagagtgggacccagccctcacctcccccagagctaacctgggaggtgctgaaggggcattgggccaccgtaagcaagggaaaaagggcagatcatgcggggagatgaccttgatctttgattgctaccctaaccttgacctttaacccgtgattccccccagctcctggaagagatgtcctaatatctcttagggacccagacccctaaattctcctcctcccccattttgatgttaaggtggagagggcatatgcatcctctgtcctgatctaggtgtctatagctgaggggtaagaggttgttgtagttgtcctggtgcctccatcagactctccctacttgtcccatatttgcaaggggaggggatttggggctggggctccattcaccaaagctgaggtggcttctcattaaccccttaggactctgaagggtatggacctacgtgaatgtgtgtcagggggagacttgctggtgggttagtggtcctcaggatgtgataaaaacatccagtgtaaaaaggaagttggaatgggagttggcgggcagtgaacgagtgtggggaaggattggtgctggggcaacaggaaggggcctggggccgtttggctgcactaactttggtagctcagtgtgcatctaaagtgggactggggagggagctaagcttgggctgggctgcttggggcttggcatagggtggaaagggctaccctggggcttctgacccccctgtagtatgtgtggagggtgccctcccgtctcccacaacttctgctataacaataaactgtagaggaatcggaaaaaaaaaaaaaaaaaaaaaaaaaaaaaa

SEQ ID NO: 498 - DNA, 3148 bp, human
cgccgccatcctcggcgcgactcgcttctttcggttctacctgggagaatccaccgccatccgccaccatggtgaacttcacggtagaccagatccgcgccatcatggacaagaaggccaacatccgcaacatgtctgtcatcgcccacgtggaccatggcaagtccacgctgacagactccctggtgtgcaaggcgggcatcatcgcctcggcccgggccggggagacacgcttcactgatacccggaaggacgagcaggagcgttgcatcaccatcaagtcaactgccatctccctcttctacgagctctcggagaatgacttgaacttcatcaagcagagcaaggacggtgccggcttcctcatcaacctcattgactcccccgggcatgtcgacttctcctcggaggtgactgctgccctccgagtcaccgatggcgcattggtggtggtggactgcgtgtcaggcgtgtgcgtgcagacggagacagtgctgcggcaggccattgccgagcgcatcaagcctgtgctgatgatgaacaagatggaccgcgccctgctggagctgcagctggagcccgaggagctctaccagactttccagcgcatcgtggagaacgtgaacgtcatcatctccacctacggcgagggcgagagcggccccatgggcaacatcatgatcgatcctgtcctcggtaccgtgggctttgggtctggcctccacgggtgggccttcaccctgaagcagtttgccgagatgtatgtggccaagttcgccgccaagggggagggccagttggggcctgccgagcgggccaagaaagtagaggacatgatgaagaagctgtggggtgacaggtactttgacccagccaacggcaagttcagcaagtcagccaccagccccgaagggaagaagctgccacgcaccttctgccagctgatcctggaccccatcttcaaggtgtttgatgcgatcatgaatttcaagaaagaggagacagcaaaactgatagagaaactggacatcaaactggacagcgaggacaaggacaaagaaggcaaacccctgctgaaggctgtgatgcgccgctggctgcctgccggagacgccttgttgcagatgatcaccatccacctgccctcccctgtgacggcccagaagtaccgctgcgagctcctgtacgaggggcccccggacgacgaggctgccatgggcattaaaagctgtgaccccaaaggccctcttatgatgtatatttccaaaatggtgccaacctccgacaaaggtcggttctacgcctttggacgagtcttctcggggctggtctccactggcctgaaggtcaggatcatggggcccaactatacccctgggaagaaggaggacctctacctgaagccaatccagagaacaatcttgatgatgggccgctacgtggagcccatcgaggatgtgccttgtgggaacattgtgggcctcgtgggcgtggaccagttcctggtgaagacgggcaccatcaccaccttcgagcacgcgcacaacatgcgggtgatgaagttcagcgtcagccctgttgtcagagtggccgtggaggccaagaacccggctgacctgcccaagctggtggaggggctgaagcggctggccaagtccgaccccatggtgcagtgcatcatcgaggagtcgggagagcacatcatcgcgggcgccggcgagctgcacctggagatctgcctgaaggacctggaggaggaccacgcctgcatccccatcaagaaatctgacccggtcgtctcgtaccgcgagacggtcagtgaagagtcgaacgtgctctgcctctccaagtcccccaacaagcacaaccggctgtacatgaaggcgcggcccttccccgacggcctggccgaggacatcgataaaggcgaggtgtccgcccgtcaggagctcaagcagcgggcgcgctacctggccgagaagtacgagtgggacgtggctgaggcccgcaagatctggtgctttgggcccgacggcaccggccccaacatcctcaccgacatcaccaagggtgtgcagtacctcaacgagatcaaggacagtgtggtggccggcttccagtgggccaccaaggagggcgcactgtgtgaggagaacatgcggggtgtgcgcttcgacgtccacgacgtcaccctgcacgccgacgccatccaccgcggagggggccagatcatccccacagcacggcgctgcctctacgccagtgtgctgaccgcccagccacgcctcatggagcccatctaccttgtggagatccagtgtccagagcaggtggtcggtggcatctacggggttttgaacaggaagcggggccacgtgttcgaggagtcccaggtggccggcacccccatgtttgtggtcaaggcctatctgcccgtcaacgagtcctttggcttcaccgctgacctgaggtccaacacgggcggccaggcgttcccccagtgtgtgtttgaccactggcagatcctgcccggagaccccttcgacaacagcagccgccccagccaggtggtggcggagacccgcaagcgcaagggcctgaaagaaggcatccctgccctggacaacttcctggacaaattgtaggcggcccttcctgcagcgcctgccgccccggggactcgcagcacccacagcaccacgtcctcgaattctcagacgacacctggagactgtcccgacacagcgacgctcccctgagaggtttctggggcccgctgcgtgccatcactcaaccataacacttgatgccgtttctttcaatatttatttccagagtccggaggcagcagacacgccctcttagtagggacttaatgggccggtcggggagggggaggcgggatgggacacccaacactttttccatttcttcagagggaaactcagatgtccaaactaattttaacaaacgcattaagaggtttatttgggtacatggcccgcagtggcttttgccccagaaaggggaaaggaacacgcgggtagatgatttctagcaggcaggaagtcctgtgcggtgtcaccatgagcacctccagctgtactagtgccattggaataataaatttgataaggtggtgaaaaaa

SEQ ID NO: 499 - DNA, 959 bp, human
cggcacgagcatggctacctcagagctgagctgcgaggtgtcggaggagaactgtgagcgccgggaggccttctgggcagaatggaaggatctgacactgtccacacggcccgaggagggctgctccctgcatgaggaggacacccagagacatgagacctaccaccagcaggggcagtgccaggtgctggtgcagcgctcgccctggctgatgatgcggatgggcatcctcggccgtgggctgcaggagtaccagctgccctaccagcgggtactgccgctgcccatcttcacccctgccaagatgggcgccaccaaggaggagcgtgaggacacccccatccagcttcaggagctgctggcgctggagacagccctgggtggccagtgtgtggaccgccaggaggtggctgagatcacaaagcagctgccccctgtggtgcctgtcagcaagcccggtgcacttcgtcgctccctgtcccgctccatgtcccaggaagcacagagaggctgagagggactgtgacttgggctccgctgtgcccgccctgggctgggcccttcctggctaggactgtggaggggagctgctggccatggctgctttgtagtttgcccagagttgggggctaggggaggggggagccagaggccaggatgcctgagccccctgagttcccaaagggagggtggcagagacagtgggcactaagggtggagagttgggggccagcacagctgaggaccctcagccccaggagaagggacaaaaggtactggtgagggcaagaggtgcctgggaggagtggccctgatccaggaaaatgtgaggggaatctggaacgctctaggcagaagaagctgggagggagggggaggtgaaaagggcagaggcaaggatggtggggcccccagcaccctctgttagtgccgcaataaatgctcaatcatgtgccaga

SEQ ID NO: 500 - DNA, 2772 bp, human
atggaaggagcaaagccgacattgcagctcgtgtaccaggcagtgcaggcgctttaccacgacccagatcccagcggaaaggagcgcgcctctttttggcttggggagctgcagcgttcggttcatgcatgggagatctcagaccagttgttacagatccggcaggatgtggagtcatgctattttgctgcacagaccatgaaaatgaagattcagacctcattttatgagctccccacagactctcatgcctctttacgggactcattgctaacccatatccagaacttgaaagacttgtcacctgttattgtaacgcagctggctttagcaatagcagatcttgccctacagatgccttcctggaagggatgtgtgcaaacactggtggaaaaatacagcaatgatgtgacttctttgccttttttgctggagatccttacagtgttacctgaagaagtacatagtcgttccttacgaattggagctaatcggcgcacagaaattatagaagatttggccttctactctagtacagtagtatctctattgatgacctgtgtagaaaaagcaggaacagatgagaaaatgcttatgaaggtttttcgctgtttgggaagttggtttaacttgggagttttggacagtaacttcatggctaacaataaattactagcactcctttttgaggttttgcaacaggataagacctcgtctaacctacatgaagctgcttcggactgtgtatgctcagctctctatgccattgagaatgtggagactaacttgccattagccatgcaactttttcagggagtgctgacattggagactgcctatcatatggccgtggcacgtgaagatttagacaaagttctgaattactgccgtattttcactgaactatgtgaaacttttcttgaaaaaattgtttgtactccaggccaaggtcttggggaccttcgaactctggagctgctgcttatctgtgcaggccatcctcaatatgaggtagtagaaatttcatttaacttttggtaccgactgggggaacatttgtacaaaactaacgatgaagttattcatggcatcttcaaagcttacattcagaggctgcttcacgccttggctcgacactgccagctggaaccagaccatgagggggttcctgaggagactgatgactttggggagtttcgcatgagggtatcagacctggtaaaggacttgattttcttgatagggtctatggagtgttttgctcagttatattctactctgaaagaaggcaacccaccctgggaggtgacagaagcggttctctttatcatggctgctatagcaaagagtgttgatccggaaaacaatccaacacttgtggaagtcctagaaggagttgtccgcctcccggagaccgtacatacggctgtgcgatacaccagcattgaattggttggagagatgagtgaagtcgttgatcgaaatcctcagttccttgaccctgtgttgggctatttgatgaaaggcctgtgtgaaaagcccctggcttctgctgcagccaaagccattcataacatttgctctgtctgccgagatcacatggctcagcactttaatggactcctggagattgcccgctccctcgattccttcctgttgtctccagaagctgctgtgggcttgctaaaagggacagcacttgtcctagcccgattacctttggataagattaccgaatgtcttagtgaactatgttctgttcaggttatggcattgaaaaagctgttgtctcaagagcccagcaatggcatatcctcagatcccacagtgttcttagatcgccttgcagtgatatttaggcataccaatcccattgtggaaaatggacagactcatccgtgtcagaaagtcatacaggaaatatggccagttttatccgagactctaaataagcaccgagctgataatcggattgtagagcgttgttgcaggtgcctgcgctttgctgttcgctgtgtaggcaaaggatctgcagcactgctgcagccactagtcacacagatggtgaatgtgtaccacgtacatcagcattcctgcttcctgtaccttggcagtatccttgtggatgaatatggcatggaagaaggctgtcggcagggactgctagacatgctccaggcactgtgcatccccacctttcagctcctagaacagcagaatggtctccagaatcaccctgacactgtagatgacctgttccggctagccaccaggtttattcagcgtagccctgtcaccttgctgcggagccaagtggtcatccctatcttacagtgggccattgcctctactaccctggaccaccgggatgccaattgtagtgtcatgaggtttctacgagacctcattcatacaggggtagccaatgatcatgaagaagactttgaattacggaaagaactgattggacaggtgatgaaccagcttggacagcagcttgtcagccagctgctgcacacctgctgcttttgcctccccccctataccctaccagatgtggctgaagtgctctgggagatcatgcaggttgacagaccgactttttgtcgatggttagaaaattccttaaaaggtttgccaaaggaaacaaccgtgggagctgtcacagtgacacacaaacaacttacagacttccacaagcaagtcactagtgctgaggaatgtaaacaagtttgctgggccttgcgagacttcaccaggttgtttcgatag

SEQ ID NO: 501 - DNA, 1938 bp, human
gactttggtggcaagaggagctggcggagcccagccagtgggcggggccaggggaggggcgggcaggtaggtgcagccactcctgggaggaccctgcgtggccagacggtgctggtgactcgtccacactgctcgcttcggatactccaggcgtctcccgttgcggccgctccctgccttagaggccagccttggacacttgctgcccctttccagcccggattctgggatccttccctctgagccaacatctgggtcctgccttcgacaccaccccaaggcttcctaccttgcgtgcctggagtctgccccaggggcccttgtcctgggccatggcccagaagggggtcctggggcctgggcagctgggggctgtggccattctgctctatcttggattactccggtcggggacaggagcggaaggggcagaagctccctgcggtgtggccccccaagcacgcatcacaggtggcagcagtgcagtcgccggtcagtggccctggcaggtcagcatcacctatgaaggcgtccatgtgtgtggtggctctctcgtgtctgagcagtgggtgctgtcagctgctcactgcttccccagcgagcaccacaaggaagcctatgaggtcaagctgggggcccaccagctagactcctactccgaggacgccaaggtcagcaccctgaaggacatcatcccccaccccagctacctccaggagggctcccagggcgacattgcactcctccaactcagcagacccatcaccttctcccgctacatccggcccatctgcctccctgcagccaacgcctccttccccaacggcctccactgcactgtcactggctggggtcatgtggccccctcagtgagcctcctgacgcccaagccactgcagcaactcgaggtgcctctgatcagtcgtgagacgtgtaactgcctgtacaacatcgacgccaagcctgaggagccgcactttgtccaagaggacatggtgtgtgctggctatgtggaggggggcaaggacgcctgccagggtgactctgggggcccactctcctgccctgtggagggtctctggtacctgacgggcattgtgagctggggagatgcctgtggggcccgcaacaggcctggtgtgtacactctggcctccagctatgcctcctggatccaaagcaaggtgacagaactccagcctcgtgtggtgccccaaacccaggagtcccagcccgacagcaacctctgtggcagccacctggccttcagctctgccccagcccagggcttgctgaggcccatccttttcctgcctctgggcctggctctgggcctcctctccccatggctcagcgagcactgagctggccctacttccaggatggatgcatcacactcaaggacaggagcctggtccttccctgatggcctttggacccagggcctgacttgagccactccttccttcaggactctgcgggaggctggggccccatcttgatctttgagcccattcttctgggtgtgctttttgggaccatcactgagagtcaggagttttactgcctgtagcaatggccagagcctctggcccctcacccaccatggaccagcccattggccgagctcctggggagctcctgggacccttggctatgaaaatgagccctggctcccacctgtttctggaagactgctcccggcccgcctgcccagactgatgagcacatctctctgccctctccctgtgttctgggctggggccacctttgtgcagcttcgaggacaggaaaggccccaatcttgcccactggccgctgagcgcccccgagccctgactcctggactccggaggactgagcccccaccggaactgggctggcgcttggatctggggtgggagtaacagggcagaaatgattaaaatgtttgagcac

SEQ ID NO: 502 - DNA, 1983 bp, human
ggagtcggcggctcagttgtccatgaccctgaaggtccaggagtacccgaccctcaaggtgccctacgagacgctgaacaaacgctttcgcgccgctcagaagaacattgaccgggagaccagccacgtcaccatggtggtggccgagctggagaggacgttgagcggctgccccgccgtggactccgtggtcagcctgctggacggcgtggtggagaagctcagcgtcctcaagaggaaggcggtggaatccatccaggccgaggacgagagcgccaagctgtgcaagctccggatcgagcacctcaaagagcatagcagcgaccagcccgcggcggccagcgtgtggaagaggaagcgcatggatcgcatgatggtggagcacctgctgcgttgcggctactacaacacggctgtcaagctggcgcgccagagcggcatcgagagctgcctggagttcagcctcagaatccaggagttcattgaactcatccggcagaataagagactggacgctgtgagacatgcaagaaagcacttcagccaagcagaagggagccagctggacgaggtgcgccaggccatgggcatgctggccttcccgcccgacacgcacatctccgtacaaggaccttctggaccctgcacggtggcggacctgcacggtggcggatctgatccagcagttccggtacgacaactaccgactacaccagctgggaaacaattctgtgttcaccctcaccctgcaggccggcctctcagccatcaagacaccacagtgctacaaggaggacggcagctccaagagccctgtctgccctgtgtgcagccgctccctgaacaagctggcgcacgcctgcccatggcccactgtgccaactcccgcctggtctgcaagatttctggcgacgtgatgaacgagaacaatccgcccatgatgctgcccaacggctacgtctacggctacaattctctgctttctatccgtcaagatgataaagtcgtgtgcccgagaaccaaagaagtcttccacttctcacaagccgagaaggtgtacatcatgtatgccccacgtcgtgaagcgcaccctcggggacgggctgcagtgggcggggaggcacgcttcctcctgtcccacgctccagcctgccgcggcgtttctgtttcttgcgaccaaagatccgtgagcaacgataaatactcttaggaagagagaaaataaggtttcataagtttgtacttgaaaacatttggattggtaggattttgtaacacgtcaaccatttgatgcttctgaaaagtactttcaacttgcgaaggaaactcttctttaaagactgacctaaacaccgagggaaacttaagaacgtttaaaatataggagtccgtgatttccctgtgttttcagtttctttccttctgtgaacgatgagacttggagaacgggctggtccttcaccacttcctgttggccctggctggccgggaaggtggcagcggcaccggagggacacttatggcttcattcgagagctgctgccaaaacgcctgcgcgccaccgtcgggggctggcttcgaggacgccgcctgctcgcgggtcgtgtccgcgggactgtgttcgtacgtgcatagtttcgatatcacatcgcggggctgtgttcggagtctgcgtcgtttcgtatacacaccctctgtgtgcgccttacttcctgcttcgagaatgtataacgtggaaatccacgggaccaaatttctgcagaggccttgccggatggttccataactgtagagtctaattgctatccattacagaaattaatcgttcagttgaaagaagtactgatgacttttcaaaacaaatgaaccaccgtagctgacagagaaccgtatcgtaagaggtttgtagttagtgcttatttttgcatgttgatgttgactagctaataaactgtaaatgtaaaaaaaaaaaaaaaaaaaaaa

SEQ ID NO: 503 - DNA, 1938 bp, human; identical to SEQ ID NO: 501

SEQ ID NO: 504 - DNA, 1182 bp, human
gaattccgctagactaagttggtcatgatgcagaagctactcaaatgcagtcggcttgtcctggctcttgccctcatcctggttctggaatcctcagttcaaggttatcctacgcagagagccaggtaccaatgggtgcgctgcaatccagacagtaattctgcaaactgccttgaagaaaaaggaccaatgttcgaactacttccaggtgaatccaacaagatcccccgtctgaggactgacctttttccaaagacgagaatccaggacttgaatcgtatcttcccactttctgaggactactctggatcaggcttcggctccggctccggctctggatcaggatctgggagtggcttcctaacggaaatggaacaggattaccaactagtagacgaaagtgatgctttccatgacaaccttaggtctcttgacaggaatctgccctcagacagccaggacttgggtcaacatggattagaagaggattttatgttataaaagaggattttcccaccttgacaccaggcaatgtagttagcatattttatgtaccatggttatatgattaatcttgggacaaagaattttatagaaatttttaaacatctgaaaaagaagcttaagttttatcatccttttttttctcatgaattcttaaaggattatgctttaatgctgttatctatcttattgttcttgaaaatacctgcattttttggtatcatgttcaaccaacatcattatgaaattaattagattcccatggccataaaatggctttaaagaatatatatatatttttaaagtagcttgagaagcaaattggcaggtaatatttcatacctaaattaagactctgacttggattgtgaattataatgatatgccccttttcttataaaaacaaaaaaaaaataatgaaacacagtgaatttgtagagtgggggtatttgacatattttacagggtggagtgtactatatactattacctttgaatgtgtttgcagagctagtggatgtgtttgtctacaagtatgattgctgttacataacaccccaaattaactcccaaattaaaacacagttgtgctgtcaatacctcatactgctttacctttttttcctggatatctgtgtattttcaaatgttactatatattaaagcagaaatataacc

SEQ ID NO: 505 - DNA, 1266 bp, human
cggcttgtcacctgccctaggagacgcagccgccggaccctgcccagggcacccacgcctcggcgaccaccatgtcccagaccaaaatgctgaaggtccgcgtgaccctcttctgcatcctggcaggcatcgtgctggccatgacagccgtggtaaccgaccactgggctgtgctgagcccccacatggagcaccacaacactacctgcgaggcggcccacttcggcctctggcggatttgtaccaagcgcatccccatggacgacagcaagacctgcgggcccatcaccctgcccggggagaagaactgttcctacttcaggcattttaaccccggcgagagctcggagatcttcgaattcaccactcagaaggagtacagcatctcggcagccgccatcgccatcttcagccttggcttcatcatcctgggcagcctctgtgtcctcctgtccctcgggaagaagagggactatctgctgcgacccgcgtccatgttctatgcctttgcaggtctctgcatcctcgtctcggtggaggtcatgcggcagtcggtgaagcgcatgattgacagtgaggacaccgtctggatcgagtactattactcctggtcctttgcctgcgcctgtgccgccttcatcctcctctttctcggcggtctcgccctcctgctgttctccctgcctcgaatgccccggaacccatgggagtcctgcatggatgctgagcccgagcactaaccctcctgcggccctagcgaccctcaggcttcttccccaggaagcggggtcttggcctggaaccttccagagaggaggcgggagcaattttagccccaccctgctcccatctgcccccctgcaacagtcgcaggctgcttcctctctctgagttcctctgggctgccgcaggctcccctgggaatagagcaagacgtgagtcctaacctggccacagttgggggaggcagagccagcaggtggacaggtgtttgcaggggcccaacttcccctggagctcagaggtgtccccactgtaccagcctctgataagctgcctccagttgtcctttatgaacattgcagggacaacctgtgtttgccagctgggtgttccgtgtaaatagccagcctgtctctttctcggtgataaaacacaccctctctggtgagcccagcgtcccctccttggcttccaggagccctgggaagcatttttaactgggtagaatctgactgtggcttgaaataaaaagctctcagaaaa

SEQ ID NO: 506 - DNA, 1200 bp, human
cccgctccgtcctcctcgcctgccaccggtgcacccagtccgctcacccagcccagtccgtccggtcctcaccgcctgccggccggcccaccccccaccgcaggccatggacgccatcaagaagaagatgcagatgctgaagctggacaaggagaacgccatcgaccgcgccgagcaggccgaagccgacaagaagcaagctgaggaccgctgcaagcagctggaggaggagcagcaggccctccagaagaagctgaaggggacagaggatgaggtggaaaagtattctgaatccgtgaaggaggcccaggagaaactggagcaggccgagaagaaggccactgatgctgaggcagatgtggcctccctgaaccgccgcattcagctggttgaggaggagctggaccgggcccaggagcgcctggctacagccctgcagaagctggaggaggccgagaaggcggctgatgagagcgagagaggaatgaaggtcatcgaaaaccgggccatgaaggatgaggagaagatggaactgcaggagatgcagctgaaggaggccaagcacatcgctgaggattcagaccgcaaatatgaagaggtggccaggaagctggtgatcctggaaggagagctggagcgctcggaggagagggctgaggtggccgagagtaaatgtggggacctagaggaggagctgaaaattgttaccaacaacttgaaatccctggaggcccaggcggacaagtattccaccaaagaagataaatatgaagaggagatcaaactgttggaggagaagctgaaggaggctgagacccgagcagagtttgccgagaggtctgtggcaaagttggagaaaaccatcgatgacctagaagatgaagtctatgcccagaagatgaagtacaaggccattagcgaggaactggacaacgcactcaatgacatcacctccctctgagccccacgcccagcgtgccacctcagctctcttctctcctctcctttccattctctctatggggaggggagagcaggcaggaggagcagaaattgccaacattgcacagccaggctgggagcagcctagggagagcccccatcatgcccaccacccactctggcactggcttcatcctttacctatccccttccaccctcctttgcttgcttaataaattctgaacttggaaaaaaaaa

SEQ ID NO: 507 - DNA, 424 bp, human
tggaacaactcagtgcaatgggatttttgaaccgtgaagcaaacttgcaagctctaatagcaacaggaggtgatatcaatgcagctattgaaaggttactgggctcccagccatcataggcagcatttctgtatcttgaaaaaatgtaatttatttttgataacggctcttaaactttaaaatacctgctttatttcattttgactcttggaattctgtgctgttataaacaaacccaatatgatgcattttaaggtggagtacagtaagatgtgtgggtttttctgtatttttcttttctggaacagtgggaattaaggctactgcatgcatcacttctgcatttattgtaattttttaaaaacatcaccttttatagttgggtgaccagattttgtcctgcatctgtccagtttatttgctt

SEQ ID NO: 508 - DNA, 2010 bp, human
gtgctgccgcgggtcacgtgctgcggaggcttggggaggggcggcgaggcggggtttatagcccgggcgcccgcgggccccacgctttgaccgggtcgtggcagccggagtcgtcttcgggacgcgcctgctcttcgcctttcgctgcagtccgtcgatttctttctccaggaagaaaaatggcatccgttgcagttgatccacaaccgagtgtggtgactcgggtggtcaacctgcccttggtgagctccacgtatgacctcatgtcctcagcctatctcagtacaaaggaccagtatccctacctgaagtctgtgtgtgagatggcagagaacggtgtgaagaccatcacctccgtggccatgaccagtgctctgcccatcatccagaagctagagccgcaaattgcagttgccaatacctatgcctgtaaggggctagacaggattgaggagagactgcctattctgaatcagccatcaactcagattgttgccaatgccaaaggcgctgtgactggggcaaaagatgctgtgacgactactgtgactggggccaaggattctgtggccagcacgatcacaggggtgatggacaagaccaaaggggcagtgactggcagtgtggagaagaccaagtctgtggtcagtggcagcattaacacagtcttggggagtcggatgatgcagctcgtgagcagtggcgtagaaaatgcactcaccaaatcagagctgttggtagaacagtacctccctctcactgaggaagaactagaaaaagaagcaaaaaaagttgaaggatttgatctggttcagaagccaagttattatgttagactgggatccctgtctaccaagcttcactcccgtgcctaccagcaggctctcagcagggttaaagaagctaagcaaaaaagccaacagaccatttctcagctccattctactgttcacctgattgaatttgccaggaagaatgtgtatagtgccaatcagaaaattcaggatgctcaggataagctctacctctcatgggtagagtggaaaaggagcattggatatgatgatactgatgagtcccactgtgctgagcacattgagtcacgtactcttgcaattgcccgcaacctgactcagcagctccagaccacgtgccacaccctcctgtccaacatccaaggtgtaccacagaacatccaagatcaagccaagcacatgggggtgatggcaggcgacatctactcagtgttccgcaatgctgcctcctttaaagaagtgtctgacagcctcctcacttctagcaaggggcagctgcagaaaatgaaggaatctttagatgacgtgatggattatcttgttaacaacacgcccctcaactggctggtaggtcccttttatcctcagctgactgagtctcagaatgctcaggaccaaggtgcagagatggacaagagcagccaggagacccagcgatctgagcataaaactcattaaacctgcccctatcactagtgcatgctgtggccagacagatgacaccttttgttatgttgaaattaacttgctaggcaaccctaaattgggaagcaagtagctagtataaaggccctcaattgtagttgtttccagctgaattaagagctttaaagtttctggcattagcagatgatttctgttcacctggtaagaaaagaatgataggcttgtcagagcctatagccagaactcagaaaaaattcaaatgcacttatgttctcattctatggccattgtgttgcctctgttactgtttgtattgaataaaaacatcttcatgtgggctggggtagaaactggtgtctgctctggtgtgatctgaaaaggcgtcttcactgctttatctcatgatgcttgcttgtaaaacttgattttagtttttcatttctcaaataggaatactacctttgaattcaataaaattcactgcaggatagaccagttaaaaaaaaaaaaaaaaaaaaaaaaaaaaaaa

SEQ ID NO: 509 - DNA, 1059 bp, human
gctctcgtcttctgcggctctcggtgccctctccttttcgtttccggaaacatggcctccggtgtggctgtctctgatggtgtcatcaaggtgttcaacgacatgaaggtgcgtaagtcttcaacgccagaggaggtgaagaagcgcaagaaggcggtgctcttctgcctgagtgaggacaagaagaacatcatcctggaggagggcaaggagatcctggtgggcgatgtgggccagactgtcgacgatccctacgccacctttgtcaagatgctgccagataaggactgccgctatgccctctatgatgcaacctatgagaccaaggagagcaagaaggaggatctggtgtttatcttctgggcccccgagtctgcgccccttaagagcaaaatgatttatgccagctccaaggacgccatcaagaagaagctgacagggatcaagcatgaattgcaagcaaactgctacgaggaggtcaaggaccgctgcaccctggcagagaagctggggggcagtgcggtcatctccctggagggcaagcctttgtgagccccttctggccccctgcctggagcatctggcagccccacacctgcccttgggggttgcaggctgcccccttcctgccagaccggaggggctggggggatcccagcagggggaggcaatcccttcaccccagttgccaaacagaccccccaccccctggattttccttctccctccatcccttgacggttctggccttcccaaactgcttttgatcttttgattcctcttgggctgaagcagaccaagttccccccaggcaccccagttgtgggggagcctgtattttttttaacaacatccccattccccacctggtcctcccccttcccatgctgccaacttctaaccgcaatagtgactctgtgcttgtctgtttagttctgtgtataaatggaatgttgtggagatgacccctccctgtgccggctggttcctctcccttttcccctggtcacggctactcatggaagcaggaccagtaagggaccttcgattaaaaaaaaa

SEQ ID NO: 510 - DNA, 6032 bp, human; identical to SEQ ID NO: 481

SEQ ID NO: 511 - DNA, 2138 bp, human
gttgacagtagcttctaagatgtcccagcaacacacactgccagtgaccctctcccctgccctcagtcaggagctcctcaagactgttcctcctccagtcaatacccatcaggagcaaatgaaacagccaactccactgcctcccccatgccagaaggtgcctgtcgagctcccagtggaggtcccatcaaagcaagaggaaaagcacatgactgctgtaaagggactgcctgagcaagaatgtgagcaacagcagaaggagccacaggagcaggagctgcagcaacagcactgggaacagcatgaggaatatcagaaagcagaaaacccagagcagcagcttaagcaggagaaaacacaaagggatcagcagctaaacaaacagctggaagaagagaagaagctcttagaccagcaactggatcaagagctagtcaagagagatgagcaactgggaatgaagaaagagcaactgttggagctcccagagcagcaggaggggcacctgaagcacctagagcagcaggagggacagctgaagcacccggagcagcaggaggggcagctggagctcccagagcagcaggaggggcagctggagctcccagagcagcaggaggggcagctggagctcccagagcagcaggaggggcagctggagctcccagagcagcaggaggggcagctggagctcccacagcagcaggaggggcagctggagctctctgagcagcaggaggggcagctggagctctctgagcagcaggaggggcagctggagctctctgagcagcaggagggacagctgaagcacctggagcaccaggaggggcagctggaggtcccagaggagcagatggggcagctgaagtacctggaacagcaggaggggcagctgaagcacctggatcagcaggagaagcagccagagctcccagagcagcagatggggcagctgaagcacctggagcagcaggaggggcagcctaagcatctggagcagcaggaggggcaactggagcagctggaggagcaggaggggcagctgaagcacctggagcagcaggaggggcagctggagcacctggagcaccaggaagggcagctggggctcccagagcagcaggtgctgcagctgaagcagctagagaagcagcaggggcagccaaagcacctggaggaggaggaggggcagctgaagcacctggtgcagcaggaggggcagctgaagcatctggtgcagcaggaggggcagctggagcagcaggagaggcaggtggagcacctggagcagcaggtggggcagctgaagcacctagaggagcaggagggacaactgaagcatctggagcagcagcaggggcagttggaggtcccagagcagcaggtggggcagccaaagaacctggagcaggaggagaagcaactggagctcccagagcagcaagagggccaggtgaagcacctggagaagcaggaggcacagctggagctcccagagcagcaggtaggacagccaaagcacctggaacagcaggaaaagcacctagagcacccagagcagcaggacggacaactaaaacatctggagcagcaggaggggcagctgaaggacctggagcagcagaaggggcagctggagcagcctgtgtttgccccagctccaggccaggtccaagacattcaaccagccctgcccacaaagggagaagtattgcttcctgtagagcaccagcagcagaagcaggaggtgcagtggccacccaaacataaataaccacccgcagtgtccagaggccctcagatcgtctcatacaagggaagagagagccactggctccacttatttcgggtccgctaggtggcccgtctcatctgtgaacttgactctgtccctctacatgtctctttaatggggtgagggtgggggagagagggaattattgtccagtgccaaccccaatgaccccaatcccaacctcaggtgagcagagcctctacttgagggactattgttactataggaatccttacttccccagtattgaagctgaatcagtgagtgtgtacaatgatacataataaatcctggaagtcttgggatcctaaaaaaaaaaaaaaaaaaaaaaaaaaaaaaa

SEQ ID NO: 512 - DNA, 1456 bp, human
ctcacttcctaccctcggcacccagggccagagtcagagcagcagaaactagacaccatgtgcgacgaagacgagaccaccgctcttgtgtgtgacaacggctctggcctggtgaaagctggctttgccggggatgatgcccccagggctgtgttcccatccatcgtgggccgaccccgtcaccagggtgtcatggtaggtatgggtcagaaggactcctacgtgggtgatgaggcccagagcaagcgaggtatcctgaccctgaagtaccccattgaacatggcatcatcaccaactgggacgacatggagaagatctggcaccacaccttctacaatgagctgcgtgtggcccctgaggagcacccgactctgctcaccgaggcccccctgaaccccaaagctaaccgggagaagatgactcaaatcatgtttgagaccttcaacgtgcctgccatgtatgtggctatccaggcggtgctgtccctctatgcctccggccgtaccaccggcatcgtgttggattctggggacggtgtacccacaacgtgcccatctatgagggctatgccctgccacacgccatcatgcgtctggacctggccggtcgcgacctcactgactacctgatgaaaatcctcactgagcgtggctattccttcgtgaccacagctgaacgtgagattgtgcgcgacatcaaagagaagctgtgctatgtggccctggacttcgagaatgagatggccaccgctgcctcttcctcctccctggagaagagctatgagctgcctgacgggcaggtcatcaccatcggcaatgagcgtttccgttgcccggagacgctcttccagccttcctttatcggtatggagtctgcggggatccatgagaccacctacaacagcatcatgaagtgcgacatcgacatcaggaaggacctgtacgccaacaacgtcatgtcagggggcaccaccatgtaccctggtatcgctgaccgcatgcagaaggagatcacagctctggctcccagcaccatgaagatcaagatcatcgccccccctgagcgcaagtactcagtgtggatcggtggctccatcctggcctcgctgtccaccttccagcagatgtggatcaccaagcaggagtacgacgaggctggcccctccattgtgcaccgcaaatgcttctaggcgcacccgcgactgcgttcgcgctctctctcctcaggacgacaatcgacaatcgtgctgtggttgcagggtggccccgtcctccgccgtggctccatcgccgccactgcagccggcgcctgtttttgacgtgtacatagattgactcgttttacctcattttgttatttttcaaacaaagccctgtggaaaggaaatggaaaacttgaagcattaaagccagccattctgttttgctccaaaaaaaaaaaaaaaaaaaaaaaaaa

SEQ ID NO: 513 - DNA, 1108 bp, human
  misc_feature (1084)..(1084): n is a, c, g, or t
  misc_feature (1092)..(1092): n is a, c, g, or t
gcgtcgacctacggcgaggcactggccagcccagctccacgaggactgaacaaggtgctgtctcactgccaccatgccggaagtcgagagaaaacccaagatcactgcctcccgcaaactcttgctgaagagcctgatgctggccaaggccaaggaatgctgggagcaggagcacgaggagcgcgaggctgagaaggtgcgctacctggcagagcgcatccccacgctgcagacccgtggcctgtccctcagtgccctgcaggacctgtgccgggagctgcacgccaaggtggaggtggtggatgaggagcgatacgacattgaggccaaatgcctccacaacaccagggagattaaggacctgaagctgaaggtgatggacctccgtgggaagttcaagcgcccgcccctgcgtcgagtccgtgtctcggctgacgccatgctccgggccctgctgggctccaggcacaaggtgtccatggatctgcgggccaacctcaagtctgtgaagaaggaagacacagagaaggagcggcctgtggaggtgggtgactggaggaagaacgtggaggccatgtctggcatggaaggccggaagaagatgtttgatgccgccaagtctccgacctcacaatagaggtacctagagaccagctcccttctctggggtccatcagagtctagaggataatgagggagtccacaatgggcaggcgggttgtacttagtgtggtgcacggatgcacggactaaggcaccgatgagactgatttgagtcggctctcctgggctcagtcctggctccagcaccatgatacttgggcatgtcatttctgtttggcggccctttttgttcccatcatctatgaaattgggggctgtatcaaatcagtggttctccaagtgtggtcctgggaccagcagcgtctacatcacctgggatgcaaatgatcagcccccaccccagatccactaaattggaaactctggggtgaggccagccttctaggtgattctgatgcacatgagagtttgagaaccactaggttagagggtccctgggatcccttcatctctgactttntgagaatntatgcacttttaaata

SEQ ID NO: 514 - DNA, 2487 bp, human
cctttcccctcccgccggacctgccaggaggtgggctggcgcggagggagggccctgtcccctgtccctttaaggaggagggccaaacgccggcctagagtgcggcgtagcccccacccgccgtgccctcaccccagagcagctgcagcctcagccggccgcccctccgccagccaagtccgccgctctgacccccggcagcaagtcgccaccatggtgaagatcgtgacagttaagacccaggcgtaccaggaccagaagccgggcacgagcgggctgcggaagcgggtgaaggtgttccagagcagcgccaactacgcggagaacttcatccagagtatcatctccaccgtggagccggcgcagcggcaggaggccacgctggtggtgggcggggacggccggttctacatgaaggaggccatccagctcatcgctcgcatcgctgccgccaacgggatcggtcgcttggttatcggacagaatggaatcctctccacccctgctgtatcctgcatcattagaaaaatcaaagccattggtgggatcattctgacagccagtcacaacccagggggccccaatggagattttggaatcaaattcaatatttctaatggaggtcctgctccagaagcaataactgataaaattttccaaatcagcaagacaattgaagaatatgcagtttgccctgacctgaaagtagaccttggtgttctgggaaagcagcagtttgacttggaaaataagttcaaacccttcacagtggaaattgtggattcggtagaagcttatgctacaatgctgagaagcatctttgatttcagtgcactgaaagaactactttctgggccaaaccgactgaagatccgtattgatgctatgcatggagttgtgggaccgtatgtaaagaagatcctctgtgaagaactcggtgcccctgcgaactcggcagttaactgcgttcctctggaggactttggaggccaccaccctgaccccaacctcacctatgcagctgacctggtggagaccatgaagtcaggagagcatgattttggggctgcctttgatggagatggggatcgaaacatgattctgggcaagcatgggttctttgtgaacccttcagactctgtggctgtcattgctgccaacatcttcagcattccgtatttccagcagactggggtccgcggctttgcacggagcatgcccacgagtggtgctctggaccgggtggctagtgctacaaagattgctttgtatgagaccccaactggctggaagttttttgggaatttgatggacgcgagcaaactgtccctttgtggggaggagagcttcgggaccggttctgaccacatccgtgagaaagatggactgtgggctgtccttgcctggctctccatcctagccacccgcaagcagagtgtggaggacattctcaaagatcattggcaaaagtatggccggaatttcttcaccaggtatgattacgaggaggtggaagctgagggcgcaaacaaaatgatgaaggacttggaggccctgatgtttgatcgctcctttgtggggaagcagttctcagcaaatgacaaagtttacactgtggagaaggccgataactttgaatacagcgacccagtggatggaagcatttcaagaaatcagggcttgcgcctcattttcacagatggttctcgaatcgtcttccgactgagcggcactgggagtgccggggccaccattcggctgtacatcgatagctatgagaaggacgttgccaagattaaccaggacccccaggtcatgttggccccccttatttccattgctctgaaagtgtcccagctgcaggagaggacgggacgcactgcacccactgtcatcacctaagaagacaggcctgatgtggtacgtccctccacccccggacccatccaagtcatctgattgaagagcatgacagaaacaaaatgtattcaccaagcattttaggatttgactttttcactaaccagttgacgagcagtgcatttacaaggcactgccaaacaagatgcccttgggagctgtgagggaaagaggacctgcgggcttagatcaatctcaattccttttcatgccctcctgcattgctgctgcgtgggtatttgtctccttagccatcaggtacagtttacactacaatgtaagctataggtggagcatcagcagtgagtgaggccattcttcatccttaggatgtggcaatgaaatgatggtgcaagttcctttctcttttgtgaatctttccccccatttcctgtttacatgtaacccaacaaaatgcaatttctagtgccttctgtccaatcagttctttcctctgagtgagacgtacttggctacagatttctgccttgttttgcgacattgtcccattcacacagatattttgggataataaaggaaaataagctacaaaaaaaaaaaaaaaaa

SEQ ID NO: 515 - DNA, 1045 bp, human
acactctgggtccatcttcaagacactgggctgtggatcaacccaaccaccatcctcttccaagaatcattttgacaggttcttttggaggaactccttctctttttaacccacccttttaaaaaaaaaaatggcaccaaagaaagacgtgaagaaacctgtggctgcggctgcggctgccccagccccggcaccggcacctgcacctgcccctgccccagccaaacccaaagaagaaaaaattgacctctctgccattaagatcgagttctctaaggaacagcaggatgaattcaaggaggcatttctcctgtttgacagaacaggtgattccaagatcaccttaagccaggtcggtgatgtccttcgagctctgggcacaaatcccaccaatgcagaggtcaggaaagttctgggaaaccccagcaatgaagagctgaatgccaagaaaattgagtttgaacaatttctgcctatgatgcaagccatttccaacaacaaggaccaggccacctatgaagactttgttgagggtctgcgtgtctttgacaaggaaggcaatggcacagtcatgggtgctgaactccgccatgttctagccaccctgggtgaaaagatgaaagaggaagaagtggaagccctgatggcaggtcaagaagactccaatggctgcatcaactacgaagcttttgtcaagcacatcatgtctatctgaatggagctctcaagaacaagcattgtttaggaagactggctggaaacttattttaatcacacccatgacaaactctccagatctgtttaccatcattcaggaaaacaaagcaatctggacggttcaagactgagcaactccctgaatttttatacatcttcagtttttctctgaattgaattcataccacacaaacaaagtgtctgctgctctagatgagaagaataaaatattgacaatctcaaatccaagcaccattctttattatctaccatgaatcaacgaaacattcttaaaacaataaatcaataaacaattttggtcagtctg

SEQ ID NO: 516 - DNA, 1590 bp, human
gccagatctgtgagcccagcgctgactgcgccgcggagaaagccagtgggaacccagacccataggagacccgcgtccccgctcggcctggccaggccccgcgctatggagttcctctgggcccctctcttgggtctgtgctgcagtctggccgctgctgatcgccacaccgtcttctggaacagttcaaatcccaagttccggaatgaggactacaccatacatgtgcagctgaatgactacgtggacatcatctgtccgcactatgaagatcactctgtggcagacgctgccatggagcagtacatactgtacctggtggagcatgaggagtaccagctgtgccagccccagtccaaggaccaagtccgctggcagtgcaaccggcccagtgccaagcatggcccggagaagctgtctgagaagttccagcgcttcacacctttcaccctgggcaaggagttcaaagaaggacacagctactactacatctccaaacccatccaccagcatgaagaccgctgcttgaggttgaaggtgactgtcagtggcaaaatcactcacagtcctcaggcccatgacaatccacaggagaagagacttgcagcagatgacccagaggtgcgggttctacatagcatcggtcacagtgctgccccacgcctcttcccacttgcctggactgtgctgctccttccacttctgctgctgcaaaccccgtgaaggtgtatgccacacctggccttaaagagggacaggctgaagagagggacaggcactccaaacctgtcttggggccactttcagagcccccagccctgggaaccactcccaccacaggcataagctatcacctagcagcctcaaaacgggtcagtattaaggttttcaaccggaaggaggccaaccagcccgacagtgccatccccaccttcacctcggagggatggagaaagaagtggagacagtcctttcccaccattcctgcctttaagccaaagaaacaagctgtgcaggcatggtcccttaaggcacagtgggagctgagctggaaggggccacgtggatgggcaaagcttgtcaaagatgccccctccaggagagagccaggatgcccagatgaactgactgaaggaaaagcaagaaacagtttcttgcttggaagccaggtacaggagaggcagcatgcttgggctgacccagcatctcccagcaagacctcatctgtggagctgccacagagaagtttgtagccaggtactgcattctctcccatcctggggcagcactccccagagctgtgccagcaggggggctgtgccaacctgttcttagagtgtagctgtaagggcagtgcccatgtgtacattctgcctagagtgtagcctaaagggcagggcccacgtgtatagtatctgtatataagttgctgtgtgtctgtcctgatttctacaactggagtttttttatacaatgttctttgtctcaaaataaagcaatgtgttttttcggacatgcttttctgccactccatattaaaacatatgaccattgagtccctgctaaaaaaaaaaaaaaaaaaaaaaaaaa

SEQ ID NO: 517 - DNA, 1045 bp, human; identical to SEQ ID NO: 515

SEQ ID NO: 518 - DNA, 3168 bp, human
gtcttacattttatgtgtttttttaaattctgcactttgacagtggtagcaaaataaaagtaatccaaaagttatttttctattgagaagagagaagaggtgggttttatttttttccttttgattccaatcttttctcccagtgacaaagcataaatcatggacaccagagaataaggtggacctcaggaatccggaaaagactgagaagcttacattcttcctctagagggaagagtggggtgtttatagccatctctggaacctaaaacaaaaaacatgagttgtgtgccatggaaaggagacaaggccaaatctgaatcattggagctgccccaggcagcacccccacaaatctaccatgagaaacagcgcagggagctttgtgccctccacgccctcaataacgtcttccaggacagcaatgccttcacccgggatacgctgcaagagattttccagaggttgtctccaaacaccatggtgacacctcacaagaagagcatgctgggaaatggcaactacgatgtgaatgtcattatggcagcacttcagaccaaaggctatgaagctgtttggtgggacaagcgcagggatgtcggtgtcattgccctcactaacgtcatgggcttcatcatgaatctgccctccagcctatgctggggtccactgaaactgcccctcaaaaggcagcactggatctgtgttcgagaggtgggaggggcctactacaacctcgactccaaactcaagatgcccgagtggattggaggcgagagcgagctcaggaagtttctaaaacatcatttgcgaggaaagaactgtgaactcctgctggtggtaccagaagaggtagaggctcatcagagttggaggaccgatgtgtaacagttctgcccaacctccctctcgcctcagccccttcagtcctctgtgacgtgctgtggcctctacagtgggtctgcccttgccacttccccaaacatctcatcaagtttttccccttcagatctgacagtgcaataggacagacgtgtggactgttataagaactactcagtgttttgttcctgggcaaggaaggtaggagttctgtgcacttaaggccagtggtcacaaacccttgttttatttaagagacagaggagaaagtggagcggggagggaatcctagcttattttcccttttctatgaggacttgacacaggttctgctgagttgtcactgctgctccagactcacctagagatgctgcctccactttccatcctgtctgggtctgaaaacagtgggtctgcagatagtgcccacaaaccccatgtgactggtttgaaggacccagagcataaaggtctctcaggaaaccatgtccaaaaccctagcagcggtacagcatgctgtctccaacccttatccccaggtttaagggtggtttatggccatacgtggaggttttttgttgttgtttttgagactgagtttcactcttgttgcccaggctggagtgcaatggcaccatctcggctcactgcaacctccacctcctggttcaagcgattctcaggcctcagcttcccaagtagttgggattacaggcgcctgccaccacacctggctaattttgtatttttagtagagatggggtttctccatgttggtcaggctggtctcaaactcccgacctcaagtgatctgcccgccttggcctcccaaagtgctgggattacaggcgtgagccaccgcacccggcagagttttataatgaaaaattaactaatattctagtatgaagtgaggaggatactgaacaggatgtggctaaagccaacctgggacagccatggggtggcttggtttcttcactccagtgttgtccctaccatttcgcagcattgatttaggaggctctgggacaaaagagaagccaaagagcagttttcccagttcactcactctggcaaaatcaggaaaaaaaagtctgcttttgacatcaaattccactaatttggggcagcgttgggtgaggaaagtattgtgaagacaggcttcttggagtaggggcagccacaattcagtagacactctaggctcggaggctgccactgtagttgccaagctcaggttgggtggttctgtgctgtatggatggaataggacctgggctggtcatcttcatgtcgtttcctctctgtatcaatggaagttcaacccgcccctacctcttcagatagttgtaggccacttttctcttgtaactttggaaaacaaaagaggagaaataagtatcataccatatgcgtgtctccaaagtggatgtggttgcctcaaggcaggtggcaggcaggggtgacctgctggccctcagatcaatggtcgtggcaggtctgagagctgtcccactggccagacttctctccagcagcaaagccagcctggggcttgcatgttgatcctgagcaagcttaacggggtgaagctgggctttctcccccctgtgactggagtgcatgttgacaccagcactttttctgcacatgtatcttcaatccaacaaggccgtttttttaatgctgagtaacaggccaccaagcggctactgcgttatatcttctcagcaaccggccgcagtctcttctgcaccattttctacaccagacctgcttggcaccacagggagctcttttcctgccctgcacaatgacattccaaccaccaccagccagacattacagccaaccttgctgattgtcacaagcaggaccttggggccactggcactgtcagatagtaagccatttcttgggtagaggaggaaactcctctccacaaatccacttgggcctgtgcaaatggcacttgaaagagtccccatgcacttggagtccatgagccaatgggatatgcaaagacgcttaaacatttcagggctggtttctctgttcatatccaattctggtgcttaggaacagggacccatgctgatgcccaagggcaaaaagccccacttcctttaaggaagtgaacaggcctgaccctgatgcccaataacgggcaaccctaggctttttgtttttcttgcttttattcctttttgttgttggccttgtgctgcgtttgtttacaaaagatgtattttgtttaaccaaatattaaaaatggaaaactcc

SEQ ID NO: 519 - DNA, 3643 bp, human
ggagtatgagtcacgctcaggggagcaggtaccccttctcctaaagatgaagaggagcaaactggcactaagcaaggccatcgagagcggggacactgacctggtgttcacggtgttgctgcacctgaagaacgagctgaaccgaggagattttttcatgacccttcggaatcagcccatggccctcagtttgtaccgacagttctgtaagcatcaggagctagagacgctgaaggacctttacaatcaggatgacaatcaccaggaattgggcagcttccacatccgagccagctatgctgcagaagagcgtattgaggggcgagtagcagctctgcagacagccgccgatgccttctacaaggccaagaatgagtttgcagccaaggctacagaggatcaaatgcggctcctacggctgcagcggcgcctagaagacgagctggggggccagttcctagacctgtctctacatgacacagttaccaccctcattcttggcggtcacaacaagcgtgcagagcagctggcacgtgacttccgcatccctgacaagaggtgacacaactaaaaaaaaacaaaggtatttatggaattccactgagtggtaatggatgatgcagttcaaataactaaggacacatgttcaaagagcataattaactttttaaaagaagctaataagcatggattcctggttcattcttgttctgctcggcagtggtctgatatgtgtcagtgccaacaatgctaccacagttgcaccttctgtaggaattacaagattaattaactcatcaacggcagaaccagttaaagaagaggccaaaacttcaaatccaacttcttcactaacttctctttctgtggcaccaacattcagcccaaatataactctgggacccacctatttaaccactgtcaattcttcagactctgacaatgggaccacaagaacagcaagcaccaattctataggcattacaatttcaccaaatggaacgtggcttccagataaccagttcacggatgccagaacagaaccctgggaggggaattccagcaccgcagcaaccactccagaaactttccctccttcaggtaattctgactcgaaggacagaagagatgagacaccaattattgcggtgatggtggccctgtcctctctgctagtgatcgtgtttattatcatagttttgtacatgttaaggtttaagaaatacaagcaagctgggagccattccaattctttccgcttatccaacggccgcactgaggatgtggagccccagagtgtgccacttctggccagatccccaagcaccaacaggaaatacccacccctgcccgtggacaagctggaagaggaaattaaccggagaatggcagacgacaataagctcttcagggaggaattcaacgctctccctgcatgtcctatccaggccacctgtgaggctgcttccaaggaggaaaacaaggaaaaaaatcgatatgtaaacatcttgccttatgaccactctagagtccacctgacaccggttgaaggggttccagattctgattacatcaatgcttcattcatcaacggttaccaagaaaagaacaaattcattgctgcacaaggaccaaaagaagaaacggtgaatgatttctggcggatgatctgggaacaaaacacagccaccatcgtcatggttaccaacctgaaggagagaaaggagtgcaagtgcgcccagtactggccagaccaaggctgctggacctatgggaatattcgggtgtctgtagaggatgtgactgtcctggtggactacacagtacggaagttctgcatccagcaggtgggcgacatgaccaacagaaagccacagcgcctcatcactcagttccactttaccagctggccagactttggggtgccttttaccccgatcggcatgctcaagttcctcaagaaggtgaaggcctgtaaccctcagtatgcaggggccatcgtggtccactgcagtgcaggtgtagggcgtacaggtacctttgtcgtcattgatgccatgctggacatgatgcatacagaacggaaggtggacgtgtatggctttgtgagccggatccgggcacagcgctgccagatggtgcaaaccgatatgcagtatgtcttcatataccaagcccttctggagcattatctctatggagatacagaactggaagtgacctctctagaaacccacctgcagaaaatttacaacaaaatcccagggaccagcaacaatggattagaggaggagtttaagaagttaacatcaatcaaaatccagaatgacaagatgcggactggaaaccttccagccaacatgaagaagaaccgtgttttacagatcattccatatgaattcaacagagtgatcattccagttaagcggggcgaagagaatacagactatgtgaacgcatcctttattgatggctaccggcagaaggactcctatatcgccagccagggccctcttctccacacaattgaggacttctggcgaatgatctgggagtggaaatcctgctctatcgtgatgctaacagaactggaggagagaggccaggagaagtgtgcccagtactggccatctgatggactggtgtcctatggagatattacagtggaactgaagaaggaggaggaatgtgagagctacaccgtccgagacctcctggtcaccaacaccagggagaataagagccggcagatccggcagttccacttccatggctggcctgaagtgggcatccccagtgacggaaagggcatgatcagcatcatcgccgccgtgcagaagcagcagcagcagtcagggaaccaccccatcaccgtgcactgcagcgccggggcaggaaggacggggaccttctgtgccctgagcaccgtcctggagcgtgtgaaagcagaggggattttggatgtcttccagactgtcaagagcctgcggctacagaggccacacatggtccagacactggaacagtatgagttctgctacaaggtggtgcaggagtatattgatgcattctcagattatgccaacttcaagtaagcggcaacaagggtccgtggaccaggaggattgcctttaatattttgtaatattctgttttgttaatataccccaaattgtgtatatatcttataactgttttagaaattggtacataggcttctattacctattaggtggaaattttatatgtaaatgtgttagcactgatagtcctttttccaatgttttattggggaattaaatagtgtgatgtttggattgatatcgtgaaatcctcagccgagaaattgggctggattgtgctttggttaatacatctttccctaaagaagataaacacaaaatccattccaggtagctcggcaccaactaagaaaaaaagcacaaagttctcagagctctcgaggaaagtggttgtccccgtaccaccatgcactgtaaatatccctcccctctctccctggtcccctcccccatccccaccactgatatcatggggagtaataggaccagagcggtatctctggcaccacactagggactatcaggtaataaaagctttgactccctgaaaaaaaaaaaaa

SEQ ID NO: 520 - DNA, 1807 bp, human
ctctgagtcaccaacctgaggctgccccggccgcctgcgcacccggcagcaccatgacagatcaggcctttgtgacactaaccacaaacgatgcctacgccaaaggtgccctggtcctgggatcatctctgaaacagcacaggaccaccaggaggctggtcgtgctcgccacccctcaggtctcagactccatgagaaaagttttagagacagtctttgatgaagtcatcatggtagatgtcttggacagtggcgattctgctcatctaaccttaatgaagaggccagagttgggtgtcacgctgacaaagctccactgctggtcgcttacacagtattcaaaatgtgtattcatggatgcagatactctggtcctagcaaatattgatgatctttttgacagagaagaattgtcagcagcaccagacccagggtggcctgactgcttcaattccggagtcttcgtttatcagccttcagttgaaacatacaatcagctgttgcatcttgcttctgagcaaggtagttttgatggtggggaccaaggcatactgaacacattttttagcagctgggcaacaacagatatcagaaaacacctgccgtttatttataacctaagcagcatctctatatactcctacctcccggcatttaaagtgtttggtgcaagtgccaaagttgtgcatttcctgggacgagtcaaaccatggaattatacttatgatcccaaaacaaaaagtgtcaaaagtgaggcccatgatcccaacatgactcatccagagtttctcatcctgtggtggaacatctttaccaccaacgttttacctctgcttcaacaatttggccttgtcaaagacacctgctcatatgtaaatgtgctttcagacttggtctatacactggctttctcttgtggcttctgtagaaaggaagatgtctcaggagccatatcacatctgtcccttggggagatcccagctatggcacagccgtttgtatcctcggaagaacggaaggaacgatgggaacagggccaggctgattatatgggagcagattcctttgacaacatcaagaggaaacttgacacttacctccagtagaaacactgcatttttctgtgaacacatccacttcacaagccttgtttctgatacttagtatctagagctgggttgagaaaagtctgttacagttgctagaggttttcattaaaacttatcagatgagaggcttttttaggataagaggtgagaactgggcaaaagttgtgaagcagcaattctgttatatggacagtgttctgctttttaatcctatttagcttgtttcagaaattctcacttttgttgactgccaacatacaaagtaagggaaactcaagatattaagatggctgtatcagttcttaaaatctgcagagcctggttcaaaatcagtcactcccttcagaagcagacatggcatctgttccttgcttgcttgttggttgtgtacctttcacgagacctgaattttagaattgcccagtgctgccagagtgagtgagtgtaattctcctttcaggtaaagataggctatctcaacactgctgagtgattcataaacatatcaaccaatagcattaacccattttatttcctgtccttagtgtctgaagatgctcaccagttttctgtgtacagtaaggcagcatgctaaaatgcttttgttcagttctggatatttgaaaatagcagtgtgttctctgatggttacctgcagtggcaccctgtacaaaaaataaaagacttattggtgtaaa

SEQ ID NO: 521 - DNA, 1807 bp, human; identical to SEQ ID NO: 520

SEQ ID NO: 522 - DNA, 1757 bp, human
accacaaatcaggccggacaggagagggaggggtgggggacagtgggtgggcattcagactgccagcactttgctatctacagccggggctcccgagcggcagaaagttccggccactctctgccgcttgggttgggcgaagccaggaccgtgccgcgccaccgccaggatatggagctactgtcgccaccgctccgcgacgtagacctgacggcccccgacggctctctctgctcctttgccacaacggacgacttctatgacgacccgtgtttcgactccccggacctgcgcttcttcgaagacctggacccgcgcctgatgcacgtgggcgcgctcctgaaacccgaagagcactcgcacttccccgcggcggtgcacccggccccgggcgcacgtgaggacgagcatgtgcgcgcgcccagcgggcaccaccaggcgggccgctgcctactgtgggcctgcaaggcgtgcaagcgcaagaccaccaacgccgaccgccgcaaggccgccaccatgcgcgagcggcgccgcctgagcaaagtaaatgaggcctttgagacactcaagcgctgcacgtcgagcaatccaaaccagcggttgcccaaggtggagatcctgcgcaacgccatccgctatatcgagggcctgcaggctctgctgcgcgaccaggacgccgcgccccctggcgccgcagccgccttctatgcgccgggcccgctgcccccgggccgcggcggcgagcactacagcggcgactccgacgcgtccagcccgcgctccaactgctccgacggcatgatggactacagcggccccccgagcggcgcccggcggcggaactgctacgaaggcgcctactacaacgaggcgcccagcgaacccaggcccgggaagagtgcggcggtgtcgagcctagactgcctgtccagcatcgtggagcgcatctccaccgagagccctgcggcgcccgccctcctgctggcggacgtgccttctgagtcgcctccgcgcaggcaagaggctgccgcccccagcgagggagagagcagcggcgaccccacccagtcaccggacgccgccccgcagtgccctgcgggtgcgaaccccaacccgatataccaggtgctctgaggggatggtggccgcccacccgcccgagggatggtgcccctagggtccctcgcgcccaaaagattgaacttaaatgcccccctcccaacagcgctttaaaagcgacctctcttgaggtaggagaggcgggagaactgaagtttccgcccccgccccacagggcaaggacacagcgcggttttttccacgcagcacccttctcggagacccattgcgatggccgctccgtgttcctcggtgggccagagctgaaccttgaggggctaggttcagctttctcgcgccctcccccatgggggtgagaccctcgcagacctaagccctgccccgggatgcaccggttatttgggggggcgtgagacccagtgcactccggtcccaaatgtagcaggtgtaaccgtaacccacccccaacccgtttcccggttcaggaccactttttgtaatacttttgtaatctattcctgtaaataagagttgctttgccagagcaggagcccctggggctgtatttatctctgaggcatggtgtgtggtgctacagggaatttgtacgtttataccgcaggcgggcgagccgcgggcgctcgctcaggtgatcaaaataaaggcgctaatttata

SEQ ID NO: 523 - DNA, 3316 bp, human
cactctctttctctctccctctggcatgcatgctgctggtaggagacccccaagtcaacattgcttcagaaatcctttagcactcatttctcaggagaacttatggcttcagaatcacagctcggtttttaagatggacataacctgtacgaccttctgatgggctttcaactttgaactggatgtggacacttttctctcagatgacagaattactccaacttcccctttgcagttgcttcctttccttgaaggtagctgtatcttattttctttaaaaagctttttcttccaaagccacttgccatgccgaccgtcattagcgcatctgtggctccaaggacagcggctgagccccggtccccagggccagttcctcacccggcccagagcaaggccactgaggctgggggtggaaacccaagtggcatctattcagccatcatcagccgcaattttcctattatcggagtgaaagagaagacattcgagcaacttcacaagaaatgtctagaaaagaaagttctttatgtggaccctgagttcccaccggatgagacctctctcttttatagccagaagttccccatccagttcgtctggaagagacctccggaaatttgcgagaatccccgatttatcattgatggagccaacagaactgacatctgtcaaggagagctaggggactgctggtttctcgcagccattgcctgcctgaccctgaaccagcaccttcttttccgagtcataccccatgatcaaagtttcatcgaaaactacgcagggatcttccacttccagttctggcgctatggagagtgggtggacgtggttatagatgactgcctgccaacgtacaacaatcaactggttttcaccaagtccaaccaccgcaatgagttctggagtgctctgctggagaaggcttatgctaagctccatggttcctacgaagctctgaaaggtgggaacaccacagaggccatggaggacttcacaggaggggtggcagagttttttgagatcagggatgctcctagtgacatgtacaagatcatgaagaaagccatcgagagaggctccctcatgggctgctccattgatgatggcacgaacatgacctatggaacctctccttctggtctgaacatgggggagttgattgcacggatggtaaggaatatggataactcactgctccaggactcagacctcgaccccagaggctcagatgaaagaccgacccggacaatcattccggttcagtatgagacaagaatggcctgcgggctggtcagaggtcacgcctactctgtcacggggctggatgaggtcccgttcaaaggtgagaaagtgaagctggtgcggctgcggaatccgtggggccaggtggagtggaacggttcttggagtgatagatggaaggactggagctttgtggacaaagatgagaaggcccgtctgcagcaccaggtcactgaggatggagagttctggatgtcctatgaggatttcatctaccatttcacaaagttggagatctgcaacctcacggccgatgctctgcagtctgacaagcttcagacctggacagtgtctgtgaacgagggccgctgggtacggggttgctctgccggaggctgccgcaacttcccagatactttctggaccaaccctcagtaccgtctgaagctcctggaggaggacgatgaccctgatgactcggaggtgatttgcagcttcctggtggccctgatgcagaagaaccggcggaaggaccggaagctaggggccagtctcttcaccattggcttcgccatctacgaggttcccaaagagatgcacgggaacaagcagcacctgcagaaggacttcttcctgtacaacgcctccaaggccaggagcaaaacctacatcaacatgcgggaggtgtcccagcgcttccgcctgcctcccagcgagtacgtcatcgtgccctccacctacgagccccaccaggagggggaattcatcctccgggtcttctctgaaaagaggaacctctctgaggaagttgaaaataccatctccgtggatcggccagtgaaaaagaaaaaaaccaagcccatcatcttcgtttcggacagagcaaacagcaacaaggagctgggtgtggaccaggagtcagaggagggcaaaggcaaaacaagccctgataagcaaaagcagtccccacagccacagcctggcagctctgatcaggaaagtgaggaacagcaacaattccggaacattttcaagcagatagcaggagatgacatggagatctgtgcagatgagctcaagaaggtccttaacacagtcgtgaacaaacacaaggacctgaagacacacgggttcacactggagtcctgccgtagcatgattgcgctcatggatacagatggctctggaaagctcaacctgcaggagttccaccacctctggaacaagattaaggcctggcagaaaattttcaaacactatgacacagaccagtccggcaccatcaacagctacgagatgcgaaatgcagtcaacgacgcaggattccacctcaacaaccagctctatgacatcattaccatgcggtacgcagacaaacacatgaacatcgactttgacagtttcatctgctgcttcgttaggctggagggcatgttcagagcttttcatgcatttgacaaggatggagatggtatcatcaagctcaacgttctggagtggctgcagctcaccatgtatgcctgaaccaggctggcctcatccaaagccatgcaggatcactcaggatttcagtttcaccctctatttccaaagccatttacctcaaaggacccagcagctacacccctacaggcttccaggcacctcatcagtcatgctcctcctccattttaccccctacccatccttgatcggtcatgcctagcctgaccctttagtaaagcaatgaggtaggaagaacaaacccttgtccctttgccatgtggaggaaagtgcctgcctctggtccgagccgcctcggttctgaagcgagtgctcctgcttaccttgctctaggctgtctgcagaagcacctgccggtggcactcagcacctccttgtgctagagccctccatcaccttcacgctgtcccaccatgggccaggaaccaaaccagcactgggttctactgctgtggggtaaactaactcagtggaatagggctggttactttgggctgtccaactcataagtttggctgcattttgaaaaaagctgatctaaataaaggcatgtgtatggctggtc

SEQ ID NO: 524 - DNA, 4149 bp, human
aaggcgctggcggccggcggctgccccagttctccgccgaggcggtgaggcgcctggccgggctgctccgcagggcactgatccgcgtggcccgcgaggcgcagcgcctgagcgtgctgcacgccaagtgcacccgctttgaggtgcagagcgccgtgcgcctggtgcacagctgggcgctggccgagagctgcgcgctggcagccgtcaaggcgctgtccctgtacagcatgagcgccggcgacgggctgcgccggggcaagtccgcgcgctgcggcctcaccttctcagtgggtcgctttttccgctggatggtggacacccgaatctccgtgcgcatccacgagtacgcagccatctccctcaccgcctgcatggagaacctggtggaggagatccgggccagggtgatggccagccacagccctgatggcggaggggccggaggcggggaggtgtctgctgaggccctggagatggtcatcaacaacgacgccgagctctggggcgtcttgcagccctatgagcatctcatctgcggcaagaacgccaatggtgtcctctccctccccgcatacttcagcccctacaacggcgggtccctgggccatgacgagcgagccgatgcctatgcccagctggagctccgaaccctggagcagtccctcctggccacctgcgtgggcagcatctcggagctgagtgacttggtctcccgtgccatgcaccacatgcaggggcgtcaccccctgtgcccgggtgccagccctgcccgccaggcccgccagccgccacagcccatcacttggtcccccgacgccctccacacgctctactactttctgcggtgtccacagatggagtccatggagaaccccaacctggaccccccgagaatgaccttgaacaatgaacggcccttcatgctgctgccgcccctcatggagtggatgcgcgtggccatcacctacgcagagcaccgccgcagcctcaccgtggacagcggcgacatccggcaggcagcccggctgctgctgcctggtctggactgtgaacctcggcagctcaaacccgaacactgtttcagttccttccggaggctggatgcccgagcagctactgaaaaattcaaccaggacctgggtttccgcatgctcaactgtgggaggacggacctcatcaaccaagccatcgaggccttgggtccggatggggttaacaccatggatgaccagggtatgacgccactgatgtacgcctgcgctgctggggacgaagcgatggtccagatgctgattgatgctggggcaaacttggacatccaggttccaagcaactcccccaggcacccttccatccaccccgacagccggcactggacctcactgacattcgctgtgctgcatggacacatctctgtggtccagttgctgctggatgctggtgcccatgtcgagggctcggcagtgaacggcggcgaggacagctatgcggagacgcccctgcagctggcctctgcggcagggaactatgagctggtcagtttgttgctgagccgaggcgccgaccccctcctcagcatgctggaggcccacggcatgggctcctccctccacgaggacatgaactgcttcagccactcagctgcccacggccacaggaacgtcctgaggaagctcctgacgcagccacagcaggctaaagcggacgtgctgtccctggaggagatcctggccgagggtgtggaggaaagtgatgcgtcgagccagggcagtggcagcgaggggcccgtgcggctgagccggacccgcaccaaggccctacaggaggccatgtactacagcgctgagcacggctacgtggacatcaccatggagctgagggcactgggagtcccctggaagctgcacatctggatcgagtctctgaggacctcgttctcgcagtcgcggtactcggtggtgcagagcctcctgcgggacttcagctccatcagagaggaggagtacaacgaggagctggtgaccgagggcttgcagctcatgttcgacatcctcaagaccagcaaaaacgactccgtcatccagcaactggctaccatcttcacccactgctatggcagcagtcccatccccagcatcccagagatccggaagaccctgccggccaggctagatccacactttttgaacaataaggagatgtcagatgtgaccttcctggtggaaggaaagctgttttatgcacataaagtcctgctggtgacagcttctaacaggttcaagacactaatgaccaataaatcagaacaggatggggacagcagcaagaccatcgagatcagcgacatgaagtaccacatttttcagatgatgatgcagtatctgtactacggaggaacagaatccatggagatccccaccactgacatcctggagctgctgtcagctgccagcctgttccagctggatgccctgcagaggcactgcgagatcctgtgctcccagaccctcagcatggagagtgccgtgaacacctacaaatatgccaagatccacaatgccccagaactggccctgttctgtgagggcttcttcctcaagcacatgaaggccctactggagcaggatgccttccggcagctcatctacggccgcagcagcaaagtgcagggcctggatccactgcaggacctgcagaacaccctggcagagcgcgtgcactctgtctacatcacctcccgggtgtgaggcagggggcggaggctgccgaggccagggcctgtggaggtgccagggcccaccatgtcggggtatggttgtaggccctcttggagccaggttcacggggctgtttcctcctcctcccccagatgtcccccctgtcaccgggcagctcaccctcatctcctctgccctagagctgtttgttcaatcactgatgggcaaaggggagatgtagctaactggtggccctcctccccatctcagtttgcaactcaagggcagccatgcactccccctgggtgtcgctctcccctcctgcaggtcagcagctgatcctgatccacctccgcccaggccctccaagctctactcacccctagggcctcagtaaactcagaccatcccaactggggctcctgggggtacaggaatccttatgaatgtatagaatgcatactgcctaggcccccagtcgtctgcagtaattcaaaagctggtatttttcttcctaaatgtcacatagcaaaggctgcccaaatccccaaacttgttcttcaaaggtttgacaggcttaatgtgggcatccagtggcctgtggacccccccctgccaccacgactgctgccacccggagttcccccattgtctttggtgcctgggcttccagagtccctcccatcaggactaccagcttgctcagttagcagcagagggcagttccccagcttgatggtttctgagctaagtctggcatggaggggcaaggggtaggggatggggtgctgtgtaggaatggcctcagctcttgttttgctgctggttttaggggccaaagtaaatgggtggattctggaacctcaggcctagactaggttgcctttgtgggggcgatgaagcagagtcccctggtcaagtctctcggctcctttaatgtaggattgagagctgggcaaacaggtcccactggggactgtgactcttggagattaaaggacagggcattgatggaaggtaagggccaggagaagaggcctttctgctgtgtcccctcacggccttgccctcgaattctgcaggccctgggctcccctgacacctgtcatatttatggaccagacactggggcagcatcaggcacagtctgtctgggtgcaacttcttcagctgtctggccgcaccttaaaaactatttattcaccaaaagccccaggcatttcagaaggtggcactcaggtcaccctgaaaagcccccaggggcttgcaattctggaaaatattttgactagctgcttggctggatgtacaaagaaataggcattattttattgctgtaatattgtatgatactttaactgtacaataatgttgtcacttactgtaaatgtactatggttttattaacaataaacactcattaacaatg

SEQ ID NO: 525 - DNA, 2374 bp, human
acctggtgcgggaggcccgggcagggagaagtgtgcggggccgggacaagccggctccgagtgcggggcgggaggggcctgcgcggcggcgggagcccagagccgcgctaaagcgggtcaagcgtcctccttttctccccgccccttctcctcctcctacctgggcctctgcgtggagacgcgcacctggcaaccggaggccgcgtctccgccttctctgctcgcgcctggcgcccggagcctgcccgggacctccgccggagccgcgctcgctgcaggcggcctcgagcgctctctcgttgatgccgttttggaggtgaccggcgcggcggccgctctatggtggggccgcgttagtggctgcggctccgcgggactccagggcgcggctgcgaggtggcggggcgccccgcctgcagaaccctgcttgcagctcaggtttcggggtgcttgaggaggccgccacggcagcgcgggagcggaagatgttggagctgaggcaccggggaagctgccccggccccagggaagcggtgtcgccgccacaccgcgagggagaggcggccggcggcgaccacgaaaccgagagcaccagcgacaaagaaacagatattgatgacagatatggagatttggattccagaacagattctgatattccggaaattccaccatcctcagatagaacccctgagattctcaaaaaagctctatctggtttatcttcaaggtggaaaaactggtggatacgtggaattctcactctaactatgatctcgttgtttttcctgatcatctatatgggatccttcatgctgatgcttcttgttctgggcatccaagtgaaatgcttccatgaaattatcactataggttatagagtctatcattcttatgatctaccatggtttagaacactaagttggtactttctattgtgtgtaaactactttttctatggagagactgtagctgattattttgctacatttgttcaaagagaagaacaacttcagttcctcattcgctaccatagatttatatcatttgccctctatctggcaggtttctgcatgtttgtactgagtttggtgaagaaacattatcgtctgcagttttatatgttcgcatggactcatgtcactttactgataactgtcactcagtcacaccttgtcatccaaaatctgtttgaaggcatgatatggttccttgttccaatatcaagtgttatctgcaatgacataactgcttacctttttggatttttttttgggagaactccattaattaagttgtctcctaaaaagacttgggaaggattcattggtggtttcttttccacagttgtgtttggattcattgctgcctatgtgttatccaaataccagtactttgtctgcccagtggaataccgaagtgatgtaaactccttcgtgacagaatgtgagccctcagaacttttccagcttcagacttactcacttccaccctttctaaaggcagtcttgagacaggaaagagtgagcttgtaccctttccagatccacagcattgcactgtcaacctttgcatctttaattggcccatttggaggcttctttgctagtggattcaaaagagccttcaaaatcaaggattttgcaaataccattcctggacatggtgggataatggacagatttgattgtcagtatttgatggcaacttttgtacatgtgtacatcacaagttttatccggggcccaaatcccagcaaagtgctacagcagttgttggtgcttcaacctgaacagcagttaaatatatataaaaccctgaagactcatctcattgagaaaggaatcctacaacccaccttgaaggtataactggatccagagagggaaggactgacaagaaggaattattcagaaaaacactgacagatgttttataaattgtacagaaaaatagttaaaaatgcaataggttgaagttttggagatatgtttctctctgaaattactgtgaatatttaacaaacacttacttgatctatgttatgaaataagtagcaaattgccagcaaaatgtcttgtaccttttctaaagtgtattttctgatgtgaacttccttccccttacttgctaggtttcataatttaaaagagtcaaacactataaaatgagtaagttgacgatgttttaagattgcacctggcagtgtgcctttttgcacaaatatttacttttgcacttggagctgcttttaattttagcaaaatgttttatgcaaggcacaataggaagtcagttctcctgcacttcctcctcatgtagtctggagtactttctaaagggcttagttggatttaaaaaaaaaaaaaaaaaa

SEQ ID NO: 526 - DNA, 1722 bp, human
gcggccggtcgaccggagtggctgccctgcgcggggacactcagagcccggtgggcgggaggaaggcggcatgccccagacggtgatcctcccgggccctgcgccctggggcttcaggctctcagggggcatagacttcaaccagcctttggtcatcaccaggattacaccaggaagcaaggcggcagctgccaacctgtgtcctggagatgtcatcctggctattgacggctttgggacagagtccatgactcatgctgatgcgcaggacaggattaaagcagcagctcaccagctgtgtctcaaaattgacaggggagaaactcacttatggtctccacaagtatctgaagatgggaaagcccatcctttcaaaatcaacttagaatcagaaccacaggacgggaactactttgaacacaagcataatattcggcccaaacctttcgtgatcccgggccgaagcagtggatgcagcactccctccgggattgactgtggcagtggacgcagcaccccttcttctgtcagtactgttagtaccatttgcccaggtgacttgaaagttgcggctaagctggcccctaacattcctttggaaatggaacttcctggtgtgaagattgtacatgctcagtttaatacacctatgcagttgtactcagatgacaatattatggaaacactccagggtcaggtttcaacagccctaggggaaacacctttgatgaacgagcccacagcctcggtgccccccgagtcggacgtgtaccggatgctccacgacaatcggaatgagcccacacagcctcgccagtcgggctccttcagagtgctccagggaatggtggacgatggctctgatgaccgtccggctggaacgcggagtgtgagagctccggtgacgaaagtccatggcggttcaggcggggcacagaggatgccgctctgtgacaaatgtgggagtggcatagttggtgctgtggtgaaggcgcgggataagtaccggcaccctgagtgcttcgtgtgtgccgactgcaacctcaacctcaagcaaaagggctacttcttcatagaaggggagctgtactgcgaaacccacgcaagagcccgcacaaagcccccagagggctatgacacggtcactctgtatcccaaagcttaagtctctgcaggcgtggcacgcacgcacgcacccacccacgcgcacttacacgagaagacattcatggctttgggcagaaggattgtgcagattgtcaactccaaatctaaagtcaaggctttagacctttatcctattgtttattgaggaaaaggaatgggaggcaaatgcctgctatgtgaaaaaaacatacacttagctatgttttgcaactctttttggggctagcaataatgatatttaaagcaataattttttgtatgtcatactccacaatttacatgtatattacagccatcaaacacataaacatcaagatatttgaaggactctaattgtctttccttgacaagttgattttgcaattgtggtaaatagcaaataacaatcttgtattctaacataatctgcagttgtctgtatgtgttttaactattacagtgcatgttagggagaaattccctgaatttctttagttttgtattcaaacaattatgccactcgatgcaacaaacataataaatacataaaggatttaaaaaaaaaaaaaaaaaaaa

SEQ ID NO: 527 - DNA, 4103 bp, human
ggagccctgggcgcgggggcggcgtgtcaggtggttgcggagctggtaagaatcatattctaagaactcagccactcaggtatccaccatggtgctgggtcctgaacagaagatgtcagatgacagtgtttctggagatcatggggagtctgccagtcttggtaacatcaaccctgcctatagtaatccctctctttcacagtcccctggggactcagaggagtacttcgccacttactttaatgagaagatctccattcctgaggaggagtactcttgttttagctttcgtaaactctgggctttcaccggaccaggttttcttatgagcattgcctacctggatccaggaaatattgaatccgatttgcagtctggagcagtggctggatttaagttgctctggatccttctgttggccacccttgtggggctgctgctccagcggcttgcagctagactgggagtggttactgggctgcatcttgctgaagtatgtcaccgtcagtatcccaaggtcccacgagtcatcctgtggctgatggtggagttggctatcatcggctcagacatgcaagaagtcattggctcagccattgctatcaatcttctgtctgtaggaagaattcctctgtggggtggcgttctcatcaccattgcagatacttttgtatttctcttcttggacaaatatggcttgcggaagctagaagcattttttggctttctcatcactattatggccctcacatttggatatgagtatgttacagtgaaacccagccagagccaggtactcaagggcatgttcgtaccatcctgttcaggctgtcgcactccacagattgaacaggctgtgggcatcgtgggagctgtcatcatgccacacaacatgtacctgcattctgccttagtcaagtctagacaggtaaaccggaacaataagcaggaagttcgagaagccaataagtactttttcattgaatcctgcattgcactctttgtttccttcatcatcaatgtctttgttgtctcagtctttgctgaagcattttttgggaaaaccaacgagcaggtggttgaagtctgtacaaataccagcagtcctcatgctggcctctttcctaaagataactcgacactggctgtggacatctacaaagggggtgttgtgctgggatgttactttgggcctgctgcactctacatttgggcagtggggatcctggctgcaggacagagctccaccatgacaggaacctattctggccagtttgtcatggagggattcctgaacctaaagtggtcacgctttgcccgagtggttctgactcgctctattgccatcatccccactctgcttgttgctgtcttccaagatgtagagcatctaacagggatgaatgactttctgaatgttctacagagcttacagcttccctttgctctcatacccatcctcacatttacgagcttgcggccagtaatgagtgactttgccaatggactaggctggcggattgcaggaggaatcttggtccttatcatctgttccatcaatatgtactttgtagtggtttatgtccgggacctagggcatgtggcattatatgtggtggctgctgtggtcagcgtggcttatctgggctttgtgttctacttgggttggcaatgtttgattgcactgggcatgtccttcctggactgtgggcatacggtaagcatctctaaaggcctgctgacagaagaagccacccgtggctacgttaaataacactggattagtctgtcttctgcaggtagccatcagagccagtgtgtttctatggtttactgtgtgaacatagccaaaagtatgtgccgttgcacagactgtgtttatgactcaaccgttggttggaaaagactttgtttcatgtgtatttgaaagatggaattattttttccttcctgacctaaccttagaactggattagggtgggatctttgaaaagctgacatttgctgctatcattccaacactaaattcttaagtagttgcccaagggccagctcagtttatccttcggagagacaaggatatgcatgattcttaaccaggctatatgttaaaaaaaaattggaaaatgcaatacattttttattatacaaactacagaatgagtatgcaagttttatttatcaaaatgtaatggatttttaaaggctgagaaattttccttatacctaccttttcagttattttaattataccaaattatcaactagaatagcttcatccatatgaaatataaaatgaagagacacctagctctatcaggcttaggattctttgaacttatttccactttaatttctcagtggaagttaagaggggtgagaaaacaaagaaggggaaaaactgacaactaacaaaaccagcaccacatcgctaggtggtgcttactaattaccttctcaggattttcctcagattgaaaagcttatgaggatttcttgggagtcttaataacctgcctgttagtacagagctttcctgatgatatttactcttgagcacatgtggttgtaaaaccttaactttctttctccaggagggtggtgatagaaacagatggtagtatttatgaactgatgttctcgtgaaatgttgagggtggggagaaaagactttaagggaggagagccatctattttgttcctaaagccacctctcagcagaatcgtcatgtttttctgatgcaccgctctgcttcatgcccaagatgacttgcgaggcaatctcaggagctgtggacttaaccgttgcaaagcacactgtctttctcagcgttctctgcaagtcagtaggtgttagtatggttgcaaagttcactgtctcagcaaagttgaactgggctacctctctacagctgtttcctcagagggaaaaatcttgagaccatggtggagctctggagtcagaggaaatgggtgtcttcagcacaaagctgctgcttttacttcagccacttctgacatttttacataccgagcctgagattgtgtgattatctcaaatcaaatcactttgatggagataaataatcaaaactgttttatagtcattgatttggtgagaacagtaatggaaaatggtgttgaaggacttctcatttttggagctttccttccagagtcctggctgattggtgttcgctgttcatctgagcccccaaaagcattattactgatacttgcacacagtcaaaagcgcagactggatggatggtcttttataaggcatttaagggtacactactgtgtttcactgaccatacatttttcttagcccctcaagtaatatagcacagagttatgaatgacaattcccctaaccattcctcttcatatctgcctcttccccttaccatcgtaattctccaaactggtcataaaggcactctgtgaagatattggggactgacatcttaagctctcacctggctgcagtaggaaaggccaaactgacgacaaaaaaaaaattctttataaagatgatatggtaacatgtatctttgccctgggtctgggtgggtccagtcagtctcagatttacaagcatttaggagcctaggtaaaagctgctagtattcttttaaaagttatatttatgacttgcaatgatagaaaactccttccaattaaatggcattttataatattatgtgtgtacttcacagtgttaaaaataccctcatacgttattgcatttgatcttcacagaaagtgcattttaaccagtactctgggtgcaataaataatatgtagaaatttaagtcctccaattccagcatatccagtgagttttgacagtgtgtttatgtggaatgtttaaggatatacaattgtactttatataaattggttcttgttcttcttaaatgtgacatgaaataattgtgctgctacattatactggaaattaacaggggaaaagggaagagctcttggctcccttgaggttctgctagtggtgttaggagtggttacaactgagcttttagtaaccatttaaccgtatgtaaacttggtttctaattaaaaaaaaatttctttttcc

SEQ ID NO: 528 - DNA, 2473 bp, human
aatcgcgaaacccggcgagcggcgcgctggctatcgagcgagcggggcggaaccgggagttgcgccgccgctcgggcgccgggctccgtcgcggccgcagccccgcgggtcgccctcccgtgcctcgcccgcggacaccctggccgtggacaccctggccgtgggcacccgcggggcgcggcgcgggcgctgcgcggcggcggcggcggcatgaaggtcacgtcgctcgacgggcgccagctgcgcaagatgctccgcaaggaggcggcggcgcgctgcgtggtgctcgactgccggccctatctggccttcgctgcctcgaacgtgcgcggctcgctcaacgtcaacctcaactcggtggtgctgcggcgggcccggggcggcgcggtgtcggcgcgctacgtgctgcccgacgaggcggcgcgcgcgcggctcctgcaggagggcggcggcggcgtcgcggccgtggtggtgctggaccagggcagccgccactggcagaagctgcgagaggagagcgccgcgcgtgtcgtcctcacctcgctactcgcttgcctacccgccggcccgcgggtctacttcctcaaagggggatatgagactttctactcggaatatcctgagtgttgcgtggatgtaaaacccatttcacaagagaagattgagagtgagagagccctcatcagccagtgtggaaaaccagtggtaaatgtcagctacaggccagcttatgaccagggtggcccagttgaaatccttcccttcctctaccttggaagtgcctaccatgcatccaagtgcgagttcctcgccaacttgcacatcacagccctgctgaatgtctcccgacggacctccgaggcctgcatgacccacctacactacaaatggatccctgtggaagacagccacacggctgacattagctcccactttcaagaagcaatagacttcattgactgtgtcagggaaaagggaggcaaggtcctggtccactgtgaggctgggatctcccgttcacccaccatctgcatggcttaccttatgaagaccaagcagttccgcctgaaggaggccttcgattacatcaagcagaggaggagcatggtctcgcccaactttggcttcatgggccagctcctgcagtacgaatctgagatcctgccctccacgcccaacccccagcctccctcctgccaaggggaggcagcaggctcttcactgataggccatttgcagacactgagccctgacatgcagggtgcctactgcacattccctgcctcggtgctggcaccggtgcctacccactcaacagtctcagagctcagcagaagccctgtggcaacggccacatcctgctaaaactgggatggaggaatcggcccagccccaagagcaactgtgatttttgtttttaagactcatggacatttcatacctgtgcaatactgaagacctcattctgtcatgctgccccagtgagatagtgagtggtcaccaggcttgcaaatgaacttcagacggacctcagggtaggttctcgggactgaaggaaggccaagccattacgggagcacagcatgtgctgactactgtacttccagacccctgccctcttgggactgcccagtccttgcacctcagagttcgccttttcatttcaagcataagccaataaatacctgcagcaacgtgggagaaagaagttgctggaccaggagaaaaggcagttatgaagccaattcattttgaaggaagcacaatttccaccttattttttgaactttggcagtttcaatgtctgtctctgttgcttcggggcataagctgatcaccgtctagttgggaaagtcaccctacagggtttgtagggacatgatcagcatcctgatttgaaccctgaaatgttgtgtagacaccctcttgggtccaatgaggtagttggttgaagtagcaagatgttggcttttctggattttttttgccatgggttcttcactgaccttggactttggcatgattcttagtcatacttgaacttgtctcattccacctcttctcagagcaactcttcctttgggaaaagagttcttcagatcatagaccaaaaaagtcataccttcgaggtggtagcagtagattccaggaggagaagggtacttgctaggtatcctgggtcagtggcggtgcaaactggtttcctcagctgcctgtccttctgtgtgcttatgtctcttgtgacaattgttttcctccctgcccctggaggttgtcttcaactgtggacttctgggatttgcagattttgcaacgtggtactacttttttttctttttgtctgttagttatttctccaggggaaaaggcaataattttctaagacccgtgtgaatgtgaagaaaagcagtatgttactggttgttgttgttgttcttgttttttatatgtaaaataaaaatagtgaaaggag

SEQ ID NO: 529 - DNA, 1741 bp, human
ttggaacacctggcgagtcctcggtgtcggtggccggcagtcatctcgcggccgttcagaattataaggctgtctgcagagatttgaaaaatggcaacaaatgaaagtgtcagcatctttagttcagcatccttggctgtggaatatgtagattcacttttacctgagaatcctctgcaagaaccatttaaaaatgcttggaactatatgttgaataattatacaaagttccagattgcaacatggggatcccttatagttcatgaagccctttatttcttattctgtttacctggatttttatttcaatttataccttatatgaaaaaatacaaaattcaaaaggataagccagagacatgggaaaaccaatggaagtgtttcaaagttcttctctttaatcacttctgtatccagctgcctttgatttgtggaacctattattttacagagtatttcaatattccttatgattgggaaagaatgccaagatggtattttcttttggcaagatgctttggttgtgcagtcattgaagatacttggcactattttctgcatagactcttacaccacaaaagaatatacaagtatattcataaagttcatcatgagtttcaggctccatttggaatggaagctgaatatgcacatcctttggagactctaattcttggaactggatttttcattggaatcgtgcttttgtgtgatcatgtaattcttctttgggcatgggtgaccattcgtttattagaaactattgatgtccatagtggttatgatattcctctcaaccctttaaatctgatccctttctatgctggttctcggcatcatgatttccaccacatgaacttcattggaaactatgcttcaacatttacatggtgggatcgaatttttggaacagactctcagtataatgcctataatgaaaagaggaagaagtttgagaaaaagactgaataaatatctcacgtaaaccttcctgaaagataaacgttttcctgaattcagaaactagtagctaacattgcttctggagagcagaaataagcatgtcttctggctactaagtgataaaaagaacattaacaacctttaattaccttcctagtgggaactttttctactttacctacaagttctatatatgtagaaatgaataaatatatatttaagtacagttttcatgaggaagttttaaaagaccatgttcctaagcttccaagaaggttttggatactagaagtattaatctatggcttttctcccagtaaaaccataggcctgaagttcacattgggtctttaaatcttttagatatatactggtcatttcagaaaattcttcatagtggtattggccttatatttaactttttttttattttttttttgagacaaagccacactctgtctccttgtctggagtgtggtggcacagtctcagctcactgcaacctctgcctcccagttcaagcaattcttctgcctcagcctcccaagtagctgggattacaggcacccgccaccacgcccagctaatttttgtatttttgtagagatggggtttctcgatgttggccaggctggtctcaaacttctgacctcaagtgatctgcccaccttggcctcccaaagtgctgggattacaggtgtaagccactgcgcccggcctttttaactttaaacatgttttagaattcacctaaagatcaaaatatcatggattgaac

SEQ ID NO: 530 - DNA, 2357 bp, human; identical to SEQ ID NO: 486

SEQ ID NO: 531 - DNA, 3201 bp, human
caactccctcccaccagctgacgaatggtggacccagtgacgagtggcccttgtaagggtcatggaataatttgaagcgaggcatgagcggcccctgtggtcgcctgtgactgctggagatagaggtcccagcaccccaagccaacccagcggaccctcccagccctgcttcaaccaatggggccagtggggctccaagcagccaacctaaccatccagaccccaccccactcacgcggccatggcgggccctgagggcttccagtaccgcgctctgtacccgttccgccgggagcggccggaggacctggagctgctgcccggcgacgtgctggtagtgagccgggcggccttgcaggcgctgggcgtggccgagggtggcgagcgctgcccacagagcgtgggctggatgcccggcctcaacgagcgcacacggcagcgaggtgacttccctggcacctatgtggagttcctggggcccgtggccctggcccggcccggccctcgcccacggggcccccgcccactgcccgccaggccccgtgatggggcccctgagccaggcctcacactccccgacttgcccgagcagttctccccacctgatgtggctccccctcttctggtgaagcttgtggaggccattgaaaggacagggctggacagcgaatctcactaccgcccggagctgcccgcaccgcgtacagactggtccctgagcgacgtggatcagtgggacacggcagccctggctgacggcattaagagcttcctgctggcactgcccgcgccgctcgtgacccccgaggcctcggccgaggcgcgccgggccctgcgggaggccgcggggcccgtggggccggcgctggagccaccgacgctgccgctgcaccgcgcgctcacgctgcgcttcctgctccagcacctgggccgcgtggcccgccgcgccccggccctgggtcccgcggtccgggccctgggcgccacctttgggccgctgctcctgcgcgcgccgccgccgccgtcctcgccgccgccagggggcgctcccgacgggagtgagcccagccctgacttcccggcgctgctggtggagaagctgcttcaggaacacttggaagagcaggaggttgcgcccccagcgctgccgcctaaaccccccaaggcaaagccggcccccacagtcctggccaatggagggagcccaccctccctgcaggatgctgagtggtactggggggacatttcaagggaggaggtgaacgagaaactccgggacactcccgatggcaccttcctagtccgagatgcttctagcaagatccagggcgagtacacgctgaccctcaggaaaggcgggaacaataagctgatcaaggtcttccaccgagatgggcactatggcttctcagagccactcaccttctgctccgttgtggacctcatcaatcactaccgccacgagtctctggcccagtacaatgccaagctggacacacggctcctctaccctgtgtccaaataccagcaggaccagattgtcaaggaggacagcgtggaggcagtgggcgcccagcttaaggtctatcaccagcagtaccaggacaagagccgcgagtatgaccagctttatgaagagtacacacggacctcccaggagctgcagatgaagcgtactgcaattgaggccttcaatgagactatcaagatctttgaagagcagggccagactcaagagaaatgcagcaaggaatacctggagcgcttccggcgtgagggcaacgagaaagagatgcaaaggatcctgctgaactccgagcggctcaagtcccgcattgccgagatccatgagagccgcacgaagctggagcagcagctgcgggcccaggcctcggacaacagagagatcgacaagcgcatgaacagcctcaagccggacctcatgcagctgcgcaagatccgagaccagtacctcgtgtggctcacccagaaaggcgcccggcagaagaaaatcaacgagtggctggggattaaaaatgagactgaggaccagtacgcactcatggaggacgaggacgatctcccgcaccacgaggaacgcacttggtacgtgggcaagatcaaccgcacgcaggcagaggagatgctgagcggcaagcgggatggcaccttcctcatccgcgagagcagccagcggggctgctacgcctgctccgtggtagtggacggcgacaccaagcactgcgtcatctaccgcacggccaccggcttcggcttcgcggagccctacaacctgtacgggtcgctgaaggagctggtgctgcactaccagcacgcctcgctggtgcagcacaacgacgcgctcactgtcaccctggcgcacccagtgcgcgccccgggccccggcccgccgcctgccgcccgctgagcaccgaggacccgccccaagcagagccgcccctgggcccgtctgcgccggaggctgcggcggcgggagccacggaccaagaccagccacatccaggggtcctcatttctccggctctggctcttgtttggggttctctcaccctctttctctttccttccctcccccattctccagatctccctctgtctccttttctctgtctttcttggcccctgtctctctccatgttgggggtcctaactcccccaccccatatctacgtgtcctccgggcattgccctctccatggctctggtcaccctgaccctctgccctgcccaccgcaggtcccccggggtcccggaagccccttctggctgcacctgccatgtttacagagggcccctgggctgcgcggccccagcctgggcaccctgatttttaagccatagacctggggtcagggcaggaaggaacttcactctgctgcttccgagaacctcggccgtgacattcggggccgggcgggacccgccccacagactccaacttcccctccaaaccccgaagtgaaacccgccaccgggttaccccacaagggggccgctgcgagaagttcacccacccccgaaaaaataattaaactcgcaggccaggcacggtggctcatgcctgtaatcccagcactttgggaggccaagacgggcggatcttttgaggtcgggagttggaggccagcctggccaaaatggcaaaaccccgcatctactaaaatacaaaaattagccggg

SEQ ID NO: 532 - DNA, 3316 bp, human; identical to SEQ ID NO: 523

SEQ ID NO: 533 - DNA, 1772 bp, human; identical to SEQ ID NO: 483

SEQ ID NO: 534 - DNA, 401 bp, human
gctcagcctccaaagaagccagcctctccccagttcctgaaatcctgggtgttgcctgccagtcgccatgagaacttcctaccttctgctgtttactctctgcttacttttgtctgagatggcctcaggtggtaactttctcacaggccttggccacagatctgatcattacaattgcgtcagcagtggagggcaatgtctctattctgcctgcccgatctttaccaaaattcaaggcacctgttacagagggaaggccaagtgctgcaagtgagctgggagtgaccagaagaaatgacgcagaagtgaaatgaactttttataagcattcttttaataaaggaaaattgcttttgaagtatacctcctttgggccaaaaaaaaaaaaaaaaaaaaaaaaa

SEQ ID NO: 535 - DNA, 2277 bp, human
acgccctatacaacttggcttcacatacttttacactaactttatatgatttttaaaaactggtctgatcggacttctcgtcctgggacactgtttactggagtctggccggctctccgtgctcctcttggtacctcattttggggagaaccttaaacccactcgagcagataatctccgccttgaccggtgccaccaaagaagggttggaaccatgtggacttttctgggcattgccactttcacctatttttataagaagttcggggacttcatcactttggccaacagggaggtcctgttgtgcgtgctggtgttcctctcgctgggcctggtgctctcctaccgctgtcgccaccgaaacgggggtctcctcgggcgccagcggagcggctcccagttcgccctcttctcggatattctctcaggcctgcctttcattggcttcttctgggccaaatccccccctgaatcagaaaataaggagcagctcggggccaggaggcgcagaaaaggaaccaatatttcagaaacaagcttaataggaacagctgcctgtacatcaacatcttctcagaatgacccagaagttatcatcgtgggagctggcgtgcttggctctgctttggtagctgtgctttccagagatggaagaaaggtgacagtcattgagagagacttaaaagagcctgacagaatagttggagaattcctgcagccgggtggttatcatgttctcaaagaccttggtcttggagatacagtggaaggtcttgatgcccaggttgtaaatggttacatgattcatgatcaggaaagcaaatcagaggttcagattccttaccctctgtcagaaaacaatcaagtgcagagtggaagagctttccatcacggaagattcatcatgagtctccggaaagcagctatggcagagcccaatgcaaagtttattgaaggtgttgtgttacagttattagaggaagatgatgttgtgatgggagttcagtacaaggataaagagactggagatatcaaggaactccatgctccactgactgttgttgcagatgggcttttctccaagttcaggaaaagcctggtctccaataaagtttctgtatcatctcattttgttggctttcttatgaagaatgcaccacagtttaaagcaaatcatgctgaacttattttagctaacccgagtccagttctcatctaccggatttcatccagtgaaactcgagtacttgttgacattagaggagaaatgccaaggaatttaagagaatacatggttgaaaaaatttacccacaaatacctgatcacctgaaagaaccattcttagaagccactgacaattctcatctgaggtccatgctagcaagcttccttcctccttcatcagtgaagaaacgaggtgttcttcttttgggagacgcatataatatgaggcatccacttactggtggaggaatgactgttgcttttaaagatataaaactatggagaaaactgctaaagggtatccctgacctttatgatgatgcagctattttcgaggccaacaaatcattttactgggcaagaaaaacatctcattcctttgtcgtgaatatccttgctcaggctctttatgaattattttctgccacagatgattccctgcatcaactaagaaaagcctgttttctttatttcaaacttggtggcgaatgtgttgcgggtcctgttgggctgctttctgtattgtctcctaaccctctagctttaattggacacttctttgctgttgcaatctatgccgtgtatttttgctttaagtcagaaccttggattacaaaacctcgagcccttctcagtagtagtgctgtattgtacaaagcgtgttctgtaatatttcctctaatttactcagaaatgaagtatatggttcattaagcttaaaggggaaccatttgtgaatgaatatttggaacttaccaagtcctaagagacttttggaagaggatatatatagcatagtaccataccacttataaagtggaaactcttggaccaagatttggattaatttgtttttgaagttttttgtatataaatatgtaaatacatgctttaatttgcaatttaaaatgaaggggttaaataagttagacatttgaaagaaatgattgttaccataaattagtgctaatgctgaggagaactacagtttttcttttgaatttagtatttgagatgagttgttgggacatgcaaataaaatgaagaatgac

SEQ ID NO: 536 - DNA, 1887 bp, human
gcttgaaatcgaattcgggattcgggggggacgcaccagggagggaggggtccaggcagctgggccgccgcggacacctagcggcttcagggtgaaccccgaccgcagccgtcgccgcctcgggcagagtttgcgcccttgctttgcgccccgctgcgaagccgggcgggcgatcggcgcgtgaaagcgccgcgcgggcgacctctgtcctagtctcctgctccccccgccccgcttgtcccgtgcccttgtgacccaggctttggcgccgtcgccaggccccgcaatgtagctgcccctgcgcctcggcggaggctcctgccccgcgagcgcccggggcccggagccggcctgggggctcagccgagctcgggcggggccggggcgcggtggcgatgcaccgggccgttagcgccaggagccaggcagctgaggcggggggcaagcctccctcggagagccgcgcccccggcccgcgtcccgccgcgatgctgttccacagtctgtcgggccccgaggtgcacggggtcatcgacgagatggaccgcaggcaagagcgaggctcccgcatcagctccgccatcgaccgcggcgacaccgagacgaccatgccgtccatcagcagtgaccgcgccgccctttgtggcggctgtggcggcaagatctcggaccgctactacctgctggcggtggacaagcagtggcacatgcgctgcctcaagtgctgcgagtgcaagctcaacctggagtcggagctcacctgtttcagcaaggacggtagcatctactgcaaggaagactactaccggcgcttctctgtgcagcgctgcgcccgctgccacctgggcatctcggcctcggagatggtgatgcgcgctcgggacttggtttatcacctcaactgcttcacgtgcaccacgtgtaacaagatgctgaccacgggcgaccacttcggcatgaaggacagcctggtctactgccgcttgcacttcgaggcgctgctgcagggcgagtaccccgcacacttcaaccatgccgacgtgcaggcggcgcgtgcacgcgcggcggccaagagcgcggggctgggcgcagcaggggccaaccctctgggtcttccctactacaatggcgtgggcactgtgcagaaggggcggccgaggaaacgtaagagtccgggccccggtgcggatctggcggcctacacacgtgcgctaagctgcaacgaaaacgacgcagagcacctggaccgtgaccagccataccccagcagccagaagaccaagcgcatgcgcacgtccttcaagcaccaccagcttcggaccatgaagtcttactttgccattaaccacaatcccgatgccaaggacttgaagcagctcgcgcaaaagacgggcctcaccaagcgggtcctccaggtctggttccagaacgcccgagccaagttcaggcgcaacctcttacggcaggaaaacacgggcgtggacaagtcgacagatgcggcgctgcagacagggacgccatcgggcccggcctcggagctctccaacgcctcgctcagcccctccagcacgcccaccaccctgacagacttgactagccccaccctgccaactgtgacgtccgtcttaacttctgtgcctggcaacctggaggccatgagcctcacagcccctcacaaacgactcttaccaaccttttctaatgactcgcaaccccctcaccccacaatttctttaaaaaagaaattatctttagtttgaattccaagtgtattttaaaatagaggctttgagcaactaactaaccacattttaggatctcgcctggaaacagaggtaaaaaaaagaagtgtgcgcccggctaatgcagcggtgtggaccggaattc

SEQ ID NO: 537 - DNA, 5703 bp, human
gcacatccctgcactagtggccgcaaccgagacgccgcgctccagcagctgctgccgcccagcccggccccgccgccgccccccagccctgcagccccgcagccccggccgcgcccagcccggcgaggacagcaccaggaggcggcccccagcgcggccacaaagacccccggcggcgtctctccgcggaccggtcctacttgaagtccatcatgtccttcggcagagacatggagctggagcacttcgacgagcgggataaggcgcagagatacagccgagggtcgcgggtgaacggcctgccgagcccgacgcacagcgcccactgcagcttctaccgcacccgcacgctgcagacgctcagctccgagaagaaggccaagaaagttcgtttctatcgaaacggagatcgatacttcaaagggattgtgtatgccatctccccagaccggttccgatcttttgaggccctgctggctgatttgacccgaactctgtcggataacgtgaatttgccccagggagtgagaacaatctacaccattgatgggctcaagaagatttccagcctggaccaactggtggaaggagagagttatgtatgtggctccatagagcccttcaagaaactggagtacaccaagaatgtgaaccccaactggtcggtgaacgtcaagaccacctcggcttctcgggcagtgtcttcactggccactgccaaaggaagcccttcagaggtgcgagagaataaggatttcattcggcccaagctggtcaccatcatcagaagtggcgtgaagccacggaaagctgtcaggattctgctgaacaagaaaacggctcattcctttgagcaggtcctcaccgatatcaccgatgccatcaagctggactcgggagtggtgaaacgcctgtacacgttggatgggaaacaggtgatgtgccttcaggacttttttggtgatgatgacatttttattgcatgtggaccggagaagttccgttaccaggatgatttcttgctagatgaaagtgaatgtcgagtggtaaagtccacttcttacaccaaaatagcttcatcatcccgcaggagcaccaccaagagcccaggaccgtccaggcgtagcaagtcccctgcctccaccagctcagttaatggaacccctggtagtcagctctctactccgcgctcaggcaagtcgccaagcccatcacccaccagcccaggaagcctgcggaagcagaggagctctcagcatggcggctcctctacgtcacttgcgtccaccaaagtctgcagctcgatggatgagaacgatggccctggagaagaagtgtcggaggaaggcttccagattccagctacaataacagaacgatataaagtcggaagaacaataggagatggaaattttgctgttgtcaaggaatgtgtagaaagatcgactgctagagagtacgctctgaaaattatcaagaaaagcaaatgtcgaggcaaagagcacatgatccagaatgaagtgtctattttaagaagagtgaagcatcccaatatcgttcttctgattgaggagatggatgtgccaactgaactgtatcttgtcatggaattagtaaaggggggagacctttttgatgccattacttccactaacaaatacaccgagagagacgccagtgggatgctgtacaacctagccagcgccatcaaatacctgcatagcctgaacatcgtccaccgtgatatcaagccagagaacctgctggtgtatgagcaccaagatggcagcaaatcactgaagctgggtgactttggactggccaccattgtagacggccccctgtacacagtctgtggcaccccaacatacgtggctccagaaatcattgcagagactggatacggcctcaaggtggacatctgggcagcaggtgtaatcacttatatcctgctgtgtggtttccctccattccgtggaagtggtgatgaccaggaggtgctttttgatcagattttgatggggcaggtggactttccttctccatactgggataatgtttccgattctgcaaaggagctcattaccatgatgctgttggtcgatgtagatcagcgattttctgctgttcaagtacttgagcatccctgggttaatgatgatggcctcccagaaaatgaacatcagctgtcagtagctggaaagataaagaagcatttcaacacaggccccaagccgaatagcacagcagctggagtttctgtcatagcactggaccacgggtttaccatcaagagatcagggtctttggactactaccagcaaccaggaatgtattggataagaccaccgctcttgataaggagaggcaggttttccgacgaagacgcaaccaggatgtgaggagccggtacaaggcgcagccagctcctcccgaactcaactcggaatcggaagactactccccaagctcctccgagactgttcgctcccctaactcgcccttttaataagacccttttactcaaagtcctagcttaaccctttgagactctgagatttttttcccccaaatttgtgtaaaacagtttcatctgatctatctagcgctcaatgcttgaatggcagaactgaaagtgttttcaggtatctttgtagcggtttccctttactgaataagatgacacgtggtgattgtgaagatggtaatttgctgctaatagagtcctcaaagggttaaggccaatttgcaatttttttttaaacttagaagcaatgaatgttttcatcagtcaagctaggatctgcagtatgtaatatagcacttgttaaccctctgagtgcatagaattttattgagaattcttgtttgggaatttttcaggcctttggatgtatacacacatgtttcttgattttactgcagatcaaggggtgttgttagatgctgaaatgtccagaaaagaaggacatttagaatgatatcttgtttgtccttttctgtgggtttagaacgtggcaggtttataacttagacacacgcacggttctttcttcttcacaatcctattcagaaacagattttttttttcattagagatatgactgtcagttgcagtgagttctgcatcccaagtggagggaattgggtttgtggcaaagagcttgacccaggaaatagatggtgccccccaaattgtctccacatgaagatgtactgatgacgccccagaaatgctgcttccatatcagctgctgctagcgccagcgcagactctcagggagtcaccacagcttgtcttgtgcttggtgagtgagggtctctctactcagtgtcagacatctacaggaaagaaacaactggtggaaaagagcaataaattgcccggtgctctgcagggctggaatttcaaacagaaagagggaataagatcctgtgatttttctcacctgcttttccacgcactgtggtcatcactgtgcaatctacatctagtatgaaatccacacataggagagctggggcacaaggggactggaggcagttgctttgcaagatggctgaggagaaagcacactgggaacacaatccagaatgttctaacaataagttttcagtgaataaaccactggcaagacatttccatgtgcacctttaggttacctatatagtctcctaggaagatcaggatgaaagacctagatgatacccctgaggataaaacctccatcccctaaaatgattttttttaaataccactgtctttagctgtccaggaggtcagagtgttttttctgtctttgggccaagtcctgtctgagacctgtattttcactcttgttaccaaatctatctccctagtgcagtgtctccaggcctgagtttcttctggaacagattccattttagaatggggattcacaggttctgtgcatcaccacagtgctcagagaggattctcctggggtgtcttagaggcaggtgcccaactcaaatgtattcccaaggtttgctgggctctgggatccacgagacaaccagagagggatatctcatgaaatttgcatctggtggctgaacagtacctatgttctctgttttgaatatactttaatacctgagagtcttaaaatttgtgaacaacgtttctatagtcctttattttcaaatgcacattgatcttcacttgctgcatttttactcttcaaccctgaaactatggtctacattaatatggatttttaaatcacatgtcattacttttgcaacaccatcaccaaaattttttgctcttttacatttaggttcatctctgtggtctgtgttgtcctgacatgtaaaaagcatatcgtttattgaggtttttttcccccccttttagagcatccggaagtgataacacgcaaaatcacaaagtagcataaatcagtaaattagttgagttgtttttgggggggaggtgggggtagggggcacagaacaccagaaagagtgttggtgtgtaggtagattccatattaatgaggaacactgaactagttggaaattactgctttctctagaaatataaagcaaagcactattccaaggctatggagtagctctacagcctggcctcaactctaaaagtgtgaagaatgcaatgggcagagacctacctgcagtggactgtcattttcctttctttctctgaattactgctttttctgtgggcattaactatattgctacagcatctagtgtactgagcctgcggtgcatggctcaggccttttcccatcgacgtctagggggactctggaccgtgtgaagctagggggtgtttctcagcacactgcagaagggcagctcagaagaatgcagggcccattcagcatggggatcccagcacatcactgtagaatttgagtgatctatgctgaataaacagtggaatgtgaccagtcaagtagaaatcttgagtaatcagatggaatgcaatctttctaacattaagctaccaagatcctgaatgtcagagatgtactcagagggttaacagacaagcacaaggcatgctgactacattggtgtatccagattgctttgcttttagccagtgctttctaatttttttctcgacattcttgggatagttcaagtttgaaataattaagtggtggtgttctttaaggaatttctataaccaaattgatcttatttttgatttcacttatcatagaacaaatatgtatcattatggcagtgtatctatgtaattatcaatttaatcatcaccaccggtgtttccatattttttcccaagtatttaatatagctctcttatggtggtggcctggtgatggggaccgtctttcttttactgacacatgaccaatcatatggtattttcaagggaattttaagattcatcttttcagtttgatagtagactagttaaggaagaactctttcattacttgcatcgtgtaaatcatctctgtagacatgtgttcatattaatgaacacattttttctcaacattgtagcagaaatcattttattcgtcatgatcaatgaatatgtgatttgctccagatcgttagaaggaaaagtaagatttcagtcatcaaaaatgtttttaccgtagccctcatctaacttacacgtggtgcatattaaaataagcagagaaaaaaaaatgtgaataaactactgaaaac

SEQ ID NO: 538 - DNA, 2385 bp, human
gcgccattttgaaagtggagtcgcctgcccctgccgctgccgccgccgccgtcgctgtcgtagtcgccgccgccgctgccggagaaagagcacgagcggggaagccccagagtgaaatctagcatcctgccggctggtctgcccgcccctccttccttttccccccggcccccgtcccctccccccgcaggtgccatccgccgccatccgccctctctacccccccatccccaggtgaggggggtgagttcaggaagcggagaccccgaggaacccagcagggtcaccatttgcagcgcaacatggcaggagctggaggagggaatgatattcagtggtgtttttctcaggtgaaaggagcagtagatgatgatgtagcagaagcagatataatttctacagtagaatttaatcattctggagaattactagcaacaggagataaaggtggtagagttgtcatctttcaacaggagcaggagaacaaaatccagtctcatagcagaggagaatataatgtttacagcaccttccagagccatgaaccagagtttgactacttgaaaagtttagaaatagaagaaaagatcaacaaaattaggtggttaccccagaaaaatgctgctcagtttttattgtctaccaatgataaaacaataaaattatggaaaatcagtgaaagggacaaaagaccagaagggtataacttgaaagaggaggatggaaggtatagagatcctactacagttactacactacgagtgccagtctttaggcctatggatctaatggttgaggccagtccacgaagaatatttgccaatgctcatacatatcacatcaactcaatttctattaatagtgattatgaaacatatttatctgcagatgatttgcggattaatctttggcatctggaaattacagacaggagttttaacattgtggatatcaagcctgccaatatggaagagctaacagaggtgattacagcagcagaatttcatccaaacagctgtaacacatttgtatacagcagcagtaaaggaactattcggctatgtgacatgagggcatctgccctctgtgatagacattctaaattgtttgaagaacctgaagatcccagtaacaggtcatttttttccgaaatcatctcctctatttcggatgtaaaattcagccatagtggtcgatatatgatgactagagactatttgtcagtcaaaatttgggacttaaatatggaaaacaggcctgtggaaacataccaggtgcatgaatacctcagaagtaaactctgttcactgtatgaaaatgactgcatatttgacaaatttgaatgttgttggaatggatctgacagtgttgtcatgactggatcttacaataatttcttcagaatgtttgacagaaacacaaagcgagacataaccctagaagcatcgcgggaaaacaataagcctcgcacagttctgaagcctcgcaaagtctgtgcaagtggcaagcgaaagaaagatgaaataagtgttgacagcctagacttcaataagaaaatccttcacacagcctggcaccccaaggaaaatatcattgccgtagctactacaaacaatctgtatatatttcaagacaaagtgaattagggttggcattcctagcagaagaacccacttcctgcttagttgagatagttgaatctagcattcgttcctataaaagagagaggtccattgtggcgcccctttccagtgtttgacagtgtgccattcgacaacacattgttatagctacatggagaaagctctgtggattcatcactgtggtgttctccatgtctgctagccatttaggtaagggtagggcacttttaatttaaatgacttcttgcaccatcttgcctaatggactagattggactgtatcaacattgatttactccactttttatgccttccattgtgatgacgtcaaacacagtgaaagccttcagtcatgctatgggatttaattgtgtatcctcattactgtatcatttgtggggtacaccccttccccctttttttaaattaaatacagctcattcttactgtggcttgtagcattcctcctcttctggcctcctggactgctccccttcatctcttacccttgccccctccacccggtcttggtggtggtatattaaaaaaagaaagaatgaaagcacacaaaatgagtcagtttggggtcagtggtataaagggggtatatgttgcaaacaaatgttttagtaacagttggctgtaatcactcctcgccgtgtctggcactgaaaataaggaaaaaaaacctactactgaataaaagtgacaaagaatggaaaaaaaaaaaaaaaaaaaaaaa

SEQ ID NO: 539 - DNA, 716 bp, human
agacagcctgggagggagaaggagttggagctcaagttggagacagcgaggagaaacctgccatagccagggtgtgtctttgatcctcttcaggaggtgaggacaagccagaggtccttggtgtgccctcagaaatctgcctgcagttctcaccaagccgctgtgaaaatggggataaacacccgggagctgtttctcaacttcactattgtcttgattacggttattcttatgtggctccttgtgaggtcctatcagtactgagaggccatgccatggtcctgggattgactgagatgctccggagctgcctgctctatgccctgagaccccactgctgtcattgtcacaggatgccattctccatccgagggcacctgtgacctgcactcacaatatctgctatgctgtagtgctaggattgattatgtgttctccaaagatgctgctcccaagggctgccaagtgtttgccagggaacggtagatttattccccaactcttaactgaaaatgtgttagacaagccacaaagttaaaattaaactggattcatgatgatgtaggattgttacaagcccctgatctgtctcaccacacatcccttcaacccacacggtctgcaaccaaactctaattcaacctgccagaaggaatgttagaggaagtctttgtcagcccttatagctatcatgtgaataaagttaagtcaacttc

SEQ ID NO: 540 - DNA, 1379 bp, human
gcggccgggaggccggagcagcacggccgcaggacctgaagctccggctgcgtcttcccgcagcgctacccgccatgcgcctgccgcgccgggccgcgctggggctcctgccgcttctgctgctgctgccgcccgcgccggaggccgccaagaagccgacgccctgccaccggtgccgggggctggtggacaagtttaaccaggggatggtggacaccgcaaagaagaactttggcggcgggaacacggcttgggaggaaaagacgctgtccaagtacgagtccagcgagattcgcctgctggagatcctggaggggctgtgcgagagcagcgacttcgaatgcaaccagatgctagaggcgcaggaggagcacctggaggcctggtggctgcagctgaagagcgaatatcctgacttattcgagtggttttgtgtgaagacactgaaagtgtgctgctctccaggaacctacggtcccgactgtctcgcatgccagggcggatcccagaggccctgcagcgggaatggccactgcagcggagatgggagcagacagggcgacgggtcctgccggtgccacatggggtaccagggcccgctgtgcactgactgcatggacggctacttcagctcgctccggaacgagacccacagcatctgcacagcctgtgacgagtcctgcaagacgtgctcgggcctgaccaacagagactgcggcgagtgtgaagtgggctgggtgctggacgagggcgcctgtgtggatgtggacgagtgtgcggccgagccgcctccctgcagcgctgcgcagttctgtaagaacgccaacggctcctacacgtgcgaagagtgtgactccagctgtgtgggctgcacaggggaaggcccaggaaactgtaaagagtgtatctctggctacgcgagggagcacggacagtgtgcagatgtggacgagtgcgcactagcagaaaaaacctgtgtgaggaaaaacgaaaactgctacaatactccagggagctacgtctgtgtgtgtcctgacggcttcgaaggaacggaagatgcctgtgtgccgccggcagaggctgaagccacagaaggagaaagcccgacacagctgccctcccgcgaagacctgtaatgtgccggacttaccctttaaattattcagaaggatgtcccgtggaaaatgtggccctgaggatgccgtctcctgcagtggacagcggcggggagaggctgcctgctctctaacggttgattctcatttgtcccttaaacagctgcatttcttggttgttcttaaacagacttgtatattttgatacagttctttgtaataaaattgaccattgtaggtaaaaaaaaaaaaaaaaaaaaaaaa

SEQ ID NO: 541 - DNA, 3600 bp, human
gcgggggagggggcattgatcttcgatcgcgaagatggctgctggctgcctgctggccttgactctgacacttttccaatctttgctcatcggcccctcgtcggaggagccgttcccttcggccgtcactatcaaatcatgggtggataagatgcaagaagaccttgtcacactggcaaaaacagcaagtggagtcaatcagcttgttgatatttatgagaaatatcaagatttgtatactgtggaaccaaataatgcacgccagctggtagaaattgcagccagggatattgagaaacttctgagcaacagatctaaagccctggtgagcctggcattggaagcggagaaagttcaagcagctcaccagtggagagaagattttgcaagcaatgaagttgtctactacaatgcaaaggatgatctcgatcctgagaaaaatgacagtgagccaggcagccagaggataaaacctgttttcattgaagatgctaattttggacgacaaatatcttatcagcacgcagcagtccatattcctactgacatctatgagggctcaacaattgtgttaaatgaactcaactggacaagtgccttagatgaagttttcaaaaagaatcgcgaggaagacccttcattattgtggcaggtttttggcagtgccactggcctagctcgatattatccagcttcaccatgggttgataatagtagaactccaaataagattgacctttatgatgtacgcagaagaccatggtacatccaaggagctgcatctcctaaagacatgcttattctggtggatgtgagtggaagtgttagtggattgacacttaaactgatccgaacatctgtctccgaaatgttagaaaccctctcagatgatgatttcgtgaatgtagcttcatttaacagcaatgctcaggatgtaagctgttttcagcaccttgtccaagcaaatgtaagaaataaaaaagtgttgaaagacgcggtgaataatatcacagccaaaggaattacagattataagaagggctttagttttgcttttgaacagctgcttaattataatgtttccagagcaaactgcaataagattattatgctattcacggatggaggagaagagagagcccaggagatatttaacaaatacaataaagataaaaaagtacgtgtattcaggttttcagttggtcaacacaattatgagagaggacctattcagtggatggcctgtgaaaacaaaggttattattatgaaattccttccattggtgcaataagaatcaatactcaggaatatttggatgttttgggaagaccaatggttttagcaggagacaaagctaagcaagtccaatggacaaatgtgtacctggatgcattggaactgggacttgtcattactggaactcttccggtcttcaacataaccggccaatttgaaaataagacaaacttaaagaaccagctgattcttggtgtgatgggagtagatgtgtctttggaagatattaaaagactgacaccacgttttacactgtgccccaatgggtattactttgcaatcgatcctaatggttatgttttattacatccaaatcttcagccaaagaaccccaaatctcaggagccagtaacattggatttccttgatgcagagttagagaatgatattaaagtggagattcgaaataagatgattgatggggaaagtggagaaaaaacattcagaactctggttaaatctcaagatgagagatatattgacaaaggaaacaggacatacacatggacacctgtcaatggcacagattacagtttggccttggtattaccaacctacagtttttactatataaaagccaaactagaagagacaataactcaggccagatcaaaaaagggcaaaatgaaggattcggaaaccctgaagccagataattttgaagaatctggctatacattcatagcaccaagagattactgcaatgacctgaaaatatcggataataacactgaatttcttttaaatttcaacgagtttattgatagaaaaactccaaacaacccatcatgtaacgcggatttgattaatagagtcttgcttgatgcaggctttacaaatgaacttgtccaaaattactggagtaagcagaaaaatatcaagggagtgaaagcacgatttgttgtgactgatggtgggattaccagagtttatcccaaagaggctggagaaaattggcaagaaaacccagagacatatgaggacagcttctataaaaggagcctagataatgataactatgttttcactgctccctactttaacaaaagtggacctggtgcctatgaatcgggcattatggtaagcaaagctgtagaaatatatattcaagggaaacttcttaaacctgcagttgttggaattaaaattgatgtaaattcctggatagagaatttcaccaaaacctcaatcagagatccgtgtgctggtccagtttgtgactgcaaaagaaacagtgacgtaatggattgtgtgattctggatgatggtgggtttcttctgatggcaaatcatgatgattatactaatcagattggaagattttttggagagattgatcccagcttgatgagacacctggttaatatatcagtttatgcttttaacaaatcttatgattatcagtcagtatgtgagcccggtgctgcaccaaaacaaggagcaggacatcgctcagcatatgtgccatcagtagcagacatattacaaattggctggtgggccactgctgctgcctggtctattctacagcagtttctcttgagtttgacctttccacgactccttgaggcagttgagatggaggatgatgacttcacggcctccctgtccaagcagagctgcattactgaacaaacccagtatttcttcgataacgacagtaaatcattcagtggtgtattagactgtggaaactgttccagaatctttcatggagaaaagcttatgaacaccaacttaatattcataatggttgagagcaaagggacatgtccatgtgacacacgactgctcatacaagcggagcagacttctgacggtccaaatccttgtgacatggttaagcaacctagataccgaaaagggcctgatgtctgctttgataacaatgtcttggaggattatactgactgtggtggtgtttctggattaaatccctccctgtggtatatcattggaatccagtttctactactttggctggtatctggcagcacacaccggctgttatgaccttctaaaaaccaaatctgcatagttaaactccagaccctgccaaaacatgagccctgccctcaattacagtaacgtagggtcagctataaaatcagacaaacattagctgggcctgttccatggcataacactaaggcgcagactcctaaggcacccactggctgcatgtcagggtgtcagatccttaaacgtgtgtgaatgctgcatcatctatgtgtaacatcaaagcaaaatcctatacgtgtcctctattggaaaatttgggcgtttgttgttgcattgttggt

SEQ ID NO: 542 - DNA, 1435 bp, human
acgcacgcaagcggctccagggtacgtccccgccacgcgcgctcgcaggatcggtgcgtggtgacgtttcgccggcgcgggcgccatcccggaagcgcgagcaaggccgccagatgtgcaggcagcggaggaggagaaagagatggacctcccggactcggcctcgagggtcttctgcggccgcatcctgagcatggtgaacacagatgatgtcaacgccatcatcctggcccagaagaacatgctggaccgctttgagaagaccaatgagatgctgctcaacttcaacaacctgtccagtgcccgcctgcagcagatgagcgaacgcttcctgcaccacacgaggaccctagtagagatgaaacgggacctggacagcatcttccgccgtatcaggacgctgaaagggaaactggccaggcagcacccagaggccttcagccatatcccagaggcatccttcctggaggaagaggatgaagaccccatcccacccagcaccacgaccaccattgccacctcagaacagagcacgggctcatgtgacaccagccccgacaccgtctcgccctccctgagccccggcttcgaggacctgtcccatgtccaggctggctccccagccatcaacggccgcagccagacagatgacgaggagatgacgggcgaatagccctgctgcccggtgccttgagggggtctcagggcagcagcatacaaggtggcagcgggtaaccctgccttgttctgtcatccagggctcctttgctgccccgttctgtcacccagggctcctagggggacaaggctctctcccgaggggtgtggaattcctgggggggtctttaattctggctccttccttcctcagaacatctctattctgcaagacccctctgccatgccagggcacgcccattccagctggagtcgtggggctgggcacaggggaatttttccagagctgagcctgacgtctgctctgaagaatgcttagaaggttcccagacaccagagccagatgtcccccaccaccggtcaggacctccttgaggtgcacaagcacggtctcctctgagttcaccccagcccacccccgcacccactaattctgcttttcctgccccttgctccgtaaaagtatcaaatactttctccttggtatctcaaggaggtttctgagataggtagaagtcttgagacggaggctggccatccattcagccctgagcgtgctgagttctgtgtttctctgaatagaggtgtggaacctgaggggccagcaggcctctctgaaggcctccatggagcaaacggagccacctcgggaaagagtttaatggaatatttttgtacccgatgtttacagatgctgttgggaagttatcaataaaaagacaccattactaaaaagggaaaaaaaaaaaaaaaaaaa

SEQ ID NO: 543 - DNA, 632 bp, human
ctaggaagcccagagctgcggttcgcaggcctgctaagcagccggcggccggaagtctatcccgcagaagcgcagccattcacggcctcacgcaatgcgacacttccgcctgcacgagttcttccggggcggaggtcaccatggcagctgccttggctcggcttggtctgcggcctgtcaaacaggttcgggttcagttctgtcccttcgagaaaaacgtggaatcgacgaggaccttcctgcagacggtgagcagtgagaaggtccgctccactaatctcaactgctcagtgattgcggacgtgaggcatgacggctccgagccctgcgtggacgtgctgttcggagacgggcatcgcctgattatgcgcggcgctcatctcaccgctctggaaatgctcaccgccttcgcctcccacatccgggccagggacgcggcgggcagcggggacaagccgggcgctgatactggtcgctgacagcgccaaagagaccaacaagatgattttagcgtggactaggacacttaacctaagaagagtttcacttaatcattcaaatcactatctgaagggtcacggagcgcaaaataaagtttaaaaccctgctaccacaaaaaaaaaaaaaaaaaa

SEQ ID NO: 544 - DNA, 14220 bp, human
gcggccgccttctcatcgctcctggaaggtcccgagcgcgacaccatgtcggagcccgggggcggcggcggcgaggacggctcggccggattggaagtgtcggccgtgcagaatgtggcggacgtgtcggtgctgcagaagcacctgcgcaagctggtgccgctgctgctggaggacggcggcgaggcgccggccgcgctggaggcggcgctggaggagaagagcgccctggagcagatgcgcaagttcctttcggacccgcaggtccacacggtgctggtggagcgctccacgctcaaagaggacgtcggtgatgaaggagaagaagaaaaagaattcatttcctataacatcaacatagacattcattatggggttaaatccaatagcttggcattcattaaacgtactcccgtgattgatgcagataaacccgtgtcttctcagctccgggtccttacactcagtgaagactcgccctacgaaactttgcattctttcattagcaatgcagtggctcctttttttaagtcctacattagagagtctggcaaggcagacagggatggtgataaaatggctccttcagttgaaaagaagattgcagaactcgaaatgggactccttcacttgcagcaaaatattgaaattccggagatcagcctgccgattcatccaatgatcacaaatgttgcaaaacagtgttatgagcgtggagaaaagccaaaagttacagactttggtgataaggttgaagacccaacatttcttaatcagttacaatctggagttaaccgctggatccgagaaattcaaaaagtgaccaaactggatcgagatcctgcatcaggaactgccttacaggaaattagtttttggctaaacttggaacgtgcgttataccgcatccaggagaaacgggagagcccggaagttctcctgactctggatatcttgaaacatggcaagcgcttccatgccaccgtcagttttgacactgacacaggtctaaaacaggctttggaaactgtgaatgactacaatcctctgatgaaagatttccctctgaatgatttgctgtctgccacggagctggacaaaataagacaggcgcttgttgccattttcacacatttgagaaagatccgaaacacaaaatatcctattcagagggcactgcgtttggtggaggcaatttcaagagacttgagttctcaattactcaaagtattgggcactaggaaattgatgcatgttgcttatgaagaatttgaaaaagttatggtagcatgctttgaagtttttcagacttgggatgatgagtatgagaaacttcaggtattgttgagagacatcgtcaaaagaaaaagggaagaaaatctgaagatggtgtggcgtatcaaccctgcccacaggaagctgcaggcccgccttgaccagatgagaaaatttagacgccagcatgaacagctaagagctgttatcgtcagggtcctgaggccacaggtcacggcagttgcacaacagaatcaaggagaggtccctgaaccccaagatatgaaagtggctgaggttctctttgatgctgcagatgcaaatgccattgaggaagtaaaccttgcttatgagaacgtcaaggaagtggatggactggatgtttccaaagagggcacggaagcctgggaggctgctatgaagaggtacgatgagaggatcgacagagtggagacccggatcaccgctcgccttcgggatcagcttggcacagccaagaatgccaacgagatgtttaggattttctccaggtttaatgcactgtttgtcaggcctcacatccgtggggccattcgcgaataccagacccagctgatccagcgcgtgaaagatgacattgagtctcttcacgacaagttcaaggtccagtacccacagagtcaggcttgtaagatgagtcacgttcgtgacttgccccctgtgtcagggtctatcatctgggctaaacagatcgacaggcagctgacggcctacatgaagcgggtggaagatgtccttggcaagggctgggagaatcacgtggaggggcagaagctgaagcaggatggagacagcttccgcatgaagctcaacacgcaggagatctttgatgactgggcaaggaaggtgcagcagcgcaacctcggtgtctcggggcgcattttcaccatcgaaagtactcgggttcggggccgaactggaaatgtgcttaagctgaaagttaactttcttcctgagattatcacactatccaaagaagtccggaacctcaaatggcttggtttccgcgtcccactggcgattgtgaacaaagcccatcaagcaaaccagctttacccgtttgccatctcactgatcgagagcgttcgtacctatgaacggacctgcgagaaggtggaggagcggaacaccatttcccttttggtggctggcttgaaaaaggaagtgcaggccctgatcgcagaaggcattgcgttggtgtgggagtcctacaaacttgacccatatgtacagcgcttagcagagactgtcttcaacttccaagaaaaggtggatgatctgctgatcattgaagaaaaaatagacctagaagtccgttccttggaaacttgtatgtatgaccataagacattctcggaaatcttgaacagagtccagaaagcagtggatgacttaaatctgcactcctattccaatttgcccatctgggtcaacaagcttgacatggagattgaaagaatattgggcgtccgtctgcaagctggcctgagagcttggacgcaggttcttcttggacaagctgaagataaagcagaagttgacatggacacagatgctccacaagttagtcacaagcctggtggagagccaaagatcaaaaatgtcgttcatgagctaagaataaccaatcaggtaatctacttgaatccaccaattgaagagtgcagatacaagctgtatcaggaaatgtttgcctggaagatggttgtactgtctctccccaggatccagagtcagaggtaccaggtgggtgtacattacgaattgactgaggaagagaaattctatcggaatgctttaacacggatgcctgatggccctgttgccctggaagagtcgtattctgctgtcatgggcattgtatctgaagttgaacagtatgtcaaggtttggcttcagtatcagtgtttatgggatatgcaagctgaaaacatctataacagacttggagaagatctcaacaaatggcaggctctcctggtccaaataaggaaggccagaggaacctttgacaatgcagaaaccaagaaagagtttggaccagtagttatagattatggcaaggtacaatctaaggtgaacttgaaatatgactcttggcataaggaggttcttagcaaatttgggcagatgctaggatcaaacatgacggaattccattcccagatctcaaagtcccgccaagagttggagcagcactcagtagacacggccagcacctccgatgcagtgaccttcatcacctatgtgcagtctttgaaacggaagatcaagcagtttgagaagcaagttgagctctaccgcaatggccagcgcttactggaaaagcaaaggttccagttcccaccttcctggctttatattgacaacatcgagggagagtggggagccttcaatgacatcatgcggcgaaaggactctgccattcagcagcaggtggcaaacctgcaaatgaagattgtccaggaggatcgggccgtggaaagccgcaccaccgacctgctgactgactgggagaagaccaagcctgtcacgggcaaccttcgcccagaagaggcacttcaggctctcaccatatatgaggggaagtttggtaggctgaaggacgacagagagaagtgtgcaaaggccaaggaggcgctggaattgacagatactgggcttctcagtggcagtgaagagcgcgtgcaggtggccttagaagaattacaggacctcaaaggcgtttggtcagaactttctaaggtttgggagcaaatcgatcagatgaaggagcaaccctgggtttcagtacagcctcgaaagcttcgacaaaatttggatgccctcctgaaccagctgaaaagcttccctgcccggttgcgacagtatgcgtcctatgagtttgttcagaggcttctgaaaggttacatgaagataaatatgctggtgattgaactgaaatccgaagcacttaaagaccgccattggaaacagctcatgaaaaggcttcacgttaattgggttgtttctgagctaacccttggccaaatctgggatgttgacttgcagaaaaatgaagcgattgtcaaggatgtactgcttgtggcacaaggggagatggctttggaagaatttttgaagcagataagagaagtgtggaatacttatgaactagacttggttaattatcagaacaagtgccgcttgatccgtggctgggatgacctcttcaacaaggtcaaagaacacatcaacagcgtctcggccatgaagctctctccgtattacaaggtttttgaagaggatgctctcagctgggaagataagctgaacaggatcatggctctctttgatgtgtggattgatgtgcagaggcggtgggtctacctggaaggtatcttcacaggcagtgcagatatcaagcacctgctgccagtggaaacccagcggtttcagagcatcagcactgagtttttggctctaatgaaaaaagtgtccaagtctccccttgttatggatgttctgaacatccagggagtacagaggtctctggaaagattggcagacctgctaggaaagatccagaaagcattgggagaatatctggaaagagagcggtcatctttccccaggttctattttgtgggtgatgaagatttgcttgaaatcattggaaacagcaagaatgtcgctaaattacagaaacacttcaagaagatgtttgctggagtttcgagcatcatcctgaacgaggataactctgttgttttgggtatttcatctcgggaaggagaggaggttatgtttaaaactcctgtgtcaattactgaacatcccaaaatcaatgagtggctcacattggtagaaaaggagatgagagtcaccctggccaaactgcttgctgagtctgttacggaagttgagatttttggtaaagcaacttcaattgacccaaatacctacatcacttggattgataaataccaggcccagcttgtggttttgtcagcccagatagcctggtctgagaacgtggagaccgcactgagcagcatgggcggaggtggagatgccgcgcccttgcactctgtgctgagcaatgtggaggtcaccctcaatgtgttagcagactctgtcctcatggagcagcccccactccgaaggcggaagctagaacacttgattacagagttggttcaccagagagatgttacaaggtccttgatcaaaagcaagattgacaacgccaaatcttttgaatggctcagccagatgcgattttactttgaccctaagcaaactgatgtgttacagcagttgtcaattcaaatggcaaatgccaaatttaactatggctttgagtacctgggtgttcaggacaaactggtccagacccccctcactgaccgctgctatttgacaatgacacaagccttggaggccaggctggggggttccccatttggacctgctggaactgggaaaacagagtctgtcaaagctcttggccatcagcttggacggtttgttttagttttcaactgtgatgaaacctttgatttccaggcaatgggccggatctttgtgggcctttgccaggtgggtgcctggggctgctttgacgagttcaaccgcctggaggagcggatgctctcggctgtgtcccagcaggtgcagtgcatacaggaagcactgcgtgaacattccaaccccaactacgacaagacctctgcccccattacttgtgagctgctgaacaaacaagtcaaggtgagcccggacatggccatcttcatcaccatgaaccctggctacgcgggccggtctaaccttcctgacaacttgaagaagctgttccggagcttggccatgaccaagcccgaccggcagttaatcgcccaggtcatgctgtactcacagggtttccgcactgctgaagtgcttgccaacaaaatcgtcccgttttttaaactatgcgatgagcagctctcttcccaaagccattatgacttcggtcttcgggctttgaagagtgtgctggtgagtgcaggcaatgtgaagagagagagaatccagaagataaagagggagaaagaggaacgaggggaagcagttgatgaaggagaaattgctgaaaatctccctgaacaagagattctgatacagagcgtctgtgagacgatggtgccaaagctggtggcagaggacatcccgctgctcttcagcctcctgtcggacgtgttccctggagtccagtatcacaggggtgagatgactgcccttcgagaggagctgaagaaagtgtgtcaggagatgtatttgacatatggagatggagaagaagttggtggaatgtgggttgaaaaggttctccagctctatcagatcacccagatcaatcatggcctgatgatggtggggccctcgggaagtgggaagagcatggcctggcgtgtcctgctgaaggcattggagagactcgagggtgtggaaggtgtggcccatatcatcgaccccaaggccatcagcaaagaccacctctacggaaccctggaccccaacaccagggaatggacagatgggctcttcacacacgtgctgagaaagatcatcgacagcgtgagaggcgagctgcagaagcgccagtggatcgtcttcgatggcgatgtggatccagagtgggttgagaacttgaactcagtgctggatgacaataagctcctaactttgcccaatggagagcgcctcagtcttccacccaatgtgagaataatgtttgaggtacaggacttgaaatacgcgaccttggccacagtgtcgcgctgcggcatggtctggttcagtgaggatgtgctgagcaccgacatgatcttcaacaacttcctggccaggctgcgcagcatcccgctggatgaaggggaggatgaggcacagcggcggcgtaagggcaaagaggatgagggggaggaggccgcttcccccatgctgcagatccaaagagatgcagctacgatcatgcaaccgtacttcacgtccaacggcctggtcaccaaggcgctagagcacgccttccagctggagcacatcatggacctaacacgcctgcgctgcctgggctcgctcttctccatgctgcaccaggcctgccgcaacgtggcgcagtataacgccaaccatcccgacttccccatgcagatcgagcagctggagcgctacattcagcgatatctggtttatgccatactctggtccctgtctggagacagccggctaaaaatgagagcagagctgggtgaatacatcagaagaatcacgaccgtgcctctgcccactgcgcccaacatacccattatcgattatgaggtgtccatcagcggagaatggtctccgtggcaggccaaggtgcctcagattgaagtggagacgcacaaggtggcagcccctgatgtcgtcgtgccaacgctggacacagtccgccacgaagccctcttgtacacttggctggccgaacacaagcccctggtcttgtgtggccctcctgggtctggcaagaccatgacactcttcagcgccctccgggccttgcctgacatggaggtggtgggtctcaacttctccagtgctactactccagagctgcttctgaagacttttgatcactactgcgagtacaggcgcacacctaatggggtggttttggctcctgttcaacttggaaagtggctggtgttgttctgtgatgaaatcaacttgccagatatggataaatatgggacccagagggtcatatccttcatcagacagatggtggagcacggaggcttttaccgtacctcagatcaaacatgggtgaagctggagagaatccagtttgttggggcttgtaatccccccacagaccctggaagaaagcccctctcacacaggttcctgcgccacgtgcctgtcgtgtatgtggattacccgggccccgcctccctcacacagatctacggcaccttcaaccgcgccatgctgaggctcattccatccctgcggacgtatgcagagccgctcactgctgccatggtggagttctacaccatgtctcaggagagattcacccaggatacacaacctcactatatctattcaccccgtgaaatgactaggtgggtgagaggcatctttgaagcgctgagacctctggagaccctgcctgttgaaggcctcattcggatttgggcacatgaagctctgcgtctcttccaagatagactcgtagaggatgaggagaggcgttggactgatgagaacatcgacacggttgctctgaagcacttccctaacatcgacagagagaaggcaatgagccgacccatcttgtacagcaactggctgtcaaaggattacatcccagtagaccaagaagagttaagagattatgtcaaagctaggctgaaggtcttttatgaagaagaacttgatgttccgctggtgctgtttaatgaagtcctagaccacgtgctgaggattgacagaatattccgtcaacctcaaggccacttgcttctgattggtgttagtggagcaggaaaaactaccctgtctcgtttcgtcgcctggatgaacggtttgagtgtgtaccagattaaggtccataggaagtacacaggggaagactttgatgaagatctacggacagtgttgagacgttctggctgtaaaaatgaaaagatagcatttataatggatgaatctaatgtgttagattctggattcctggagcgaatgaatacccttctggccaatggagaggtgcctggtctctttgaaggagacgagtatgccaccttgatgacgcagtgcaaagagggggcacagaaggaaggcctgatgctggactcgcacgaggagctctacaagtggttcactagccaggttatccgcaacctccacgtcgtgttcaccatgaacccgtcctcggagggactcaaggaccgggcagctacatcaccagcacttttcaacaggtgtgtgttgaattggtttggagactggtccaccgaagcactgtatcaggttggcaaagaattcacaagtaagatggatctggagaagccaaattacatcgtgcctgattacatgccagttgtgtatgataagctgccgcagccaccatcccatcgggaagccattgtgaacagctgtgtgtttgttcatcagactcttcaccaggcgaatgctcggctagcaaagcgaggcggcagaacgatggccatcacccctcgccactacctggacttcatcaatcactatgccaacctgttccacgagaagcggagcgagctggaggagcagcagatgcacttgaacgtggggctcaggaagatcaaagagacagtcgaccaggtagaagaactgcgtcgtgacttgaggataaagagccaagagctggaggtgaagaatgcagcagccaatgacaagctgaaaaagatggtgaaagaccagcaggaggctgaaaagaagaaggttatgagccaagaaatccaggaacagctgcataagcagcaggaggtaattgcagacaaacagatgagtgtcaaagaagatcttgataaggtggaacctgccgtcattgaggcccagaatgctgtgaagtcgatcaagaagcagcacctggtggaggtgaggtccatggccaaccctcctgctgctgtgaagctggcgctggagtccatctgcctgctgctgggggaaagcaccacagactggaagcagatccgctccatcatcatgcgggagaacttcatccccaccatcgtcaacttctctgcagaggagatcagtgacgccataagggagaagatgaagaaaaattacatgtccaatccaagttacaattatgaaattgtgaatcgggcttccctggcttgcggccctatggtgaaatgggcaattgcacagcttaactatgcagacatgttaaagagagtggagcccctacgcaatgagctgcagaagctggaagatgacgccaaggacaaccagcagaaggccaacgaggtggagcagatgatccgagacctggaagccagcatcgcccgctacaaggaggaatacgccgtcctgatctcagaggcccaggccatcaaggcagacctggcagctgtcgaggcaaaagtaaaccggagcactgctcttctgaagagcttgtctgctgaacgtgaacgatgggaaaaaacaagtgaaactttcaaaaaccagatgtccaccattgctggggactgtctcttgtcagctgcgttcattgcctacgcgggttactttgaccagcagatgcgtcagaacttgttcactacctggtcccatcacctacagcaagccaacatccagttccgtacagatattgccaggacggaatacctttccaatgctgatgagcgtcttcgctggcaggccagctccttgcctgctgatgacctttgcacagaaaatgccatcatgctgaaacgattcaataggtatccgctgatcattgacccctctggacaggccacagaattcattatgaatgaatataaggatcgtaagatcacacggaccagcttcctggatgacgccttcagaaagaacttagagagtgcactgagattcggtaacccccttctggtccaggatgtggaaagctacgatccagttttgaacccggtgctgaaccgtgaagtgcggcgaacaggggggagagtgctgatcactctcggggaccaggacatagacctgtcgccatcgtttgtcatcttcctgtccacccgggatccaactgtcgagttcccaccagatctctgttcccgggttacttttgtaaacttcacagttacccgtagcagtttacaaagccagtgtctaaatgaagtacttaaagcagaaagacctgatgtggacgagaaacgatctgatcttcttaaacttcaaggggaatttcagctccgtttgcgtcagctggaaaaatctctactacaagctctgaacgaggtgaaagggcgcattttggatgacgacacgatcataaccactctggagaacctgaagagagaggctgcagaggtcaccaggaaagttgaggagacggacattgtcatgcaggaggtggagaccgtgtcccagcagtacctcccgctctccaccgcctgcagcagcatctacttcaccatggagtccctcaagcagatacacttcttgtaccagtactccctccagtttttcctggacatttatcacaacgtcctatacgagaacccgaacctgaagggtgtcaccgaccacacacagcgcctgtccattataacaaaggacctcttccaggtggcgtttaaccgagtggctcgaggcatgctgcatcaggaccacattacctttgccatgctgctggcaagaatcaaactgaagggcaccgtgggggagcccacctacgatgcagaattccagcacttcttgagaggaaatgagattgtcctgagtgctggctccacccccaggatccagggcctgactgtggagcaggcggaggcggtggtgaggctgagctgccttcccgcgtttaaggacttgattgcaaaggttcaggcagacgagcaatttggcatctggctggacagcagctccccggagcagactgtgccctacctctggagtgaagaaacacctgcaacacccattggccaggccatccaccgcctgctcctgatccaggctttccggcccgatcgcctgttggccatggcccacatgtttgtttcaacaaaccttggggagtctttcatgtccatcatggagcagccgctcgacctgacccacattgtgggcacagaggtgaagcccaacactcctgtcttaatgtgctctgtgcctggttatgatgccagtggacatgtcgaggaccttgcagccgagcagaacacgcagatcacttcaattgcaatcggctctgcagaaggctttaaccaagcagataaggcaataaacaccgctgtaaagtcgggcaggtgggtgatgctgaagaatgtgcatctggccccagggtggctgatgcagctggagaagaagttgcattccctgcagccgcatgcctgcttccgactcttcctcaccatggagatcaaccccaaggtgcctgtgaatctgctccgtgcgggccgcatctttgtgttcgagccaccgccaggggtgaaggccaacatgctgaggacgttcagcagcattcccgtctcacggatatgcaagtctcccaacgagcgtgcccgcttgtacttcctgctggcctggtttcatgcgatcatccaagaacgcttacgatacgcaccactggggtggtcaaagaagtatgaatttggagagtctgacctgcggtcagcttgcgatacggtggacacgtggctggatgacacggccaagggcaggcagaacatctcaccggataagatcccgtggtctgcactaaagaccttaatggcccagtccatttatggcgggcgcgtggacaacgagtttgaccagcgtctgctcaacaccttcctggagcgcctgttcacaaccaggagtttcgacagtgagtttaagctggcatgcaaggtcgacggacataaagacattcaaatgccagatggcatcaggcgagaggagtttgtgcagtgggtggagttgctccccgacacccagacgccctcctggctgggcctgcccaacaacgccgagagagtcctccttaccacacagggtgtggacatgatcagtaaaatgctgaagatgcagatgttggaggatgaggacgacctggcctacgcagagactgagaagaagacgaggacagactccacgtccgacgggcgccctgcctggatgcggacactgcacaccaccgcgtccaactggctgcacctcatcccccagacgctgagccacctcaagcgcaccgtggagaatatcaaggatcctttgttcaggttctttgagagagaagtgaagatgggcgcaaagctgcttcaggacgttcgccaggaccttgcagatgtcgtccaggtgtgcgaaggaaagaagaagcagaccaactacttgcgcacgctgatcaacgagctagtgaaagggatcttgcctcggagctggtcccactacacggtgcctgccggcatgaccgtcatccagtgggtgtccgacttcagcgagaggatcaaacagctgcagaacatctcactggcagctgcatctggtggcgccaaggagctaaagaacatccacgtgtgcctgggtggcctgttcgtgcctgaggcgtacatcactgccaccaggcagtatgtggcccaggccaacagctggtccctggaggagctctgcctggaagtcaacgtcaccacctcacagggcgccacccttgacgcttgcagcttcggagtcacgggtttgaaacttcaaggggccacgtgcaacaacaacaagctgtcactgtccaatgccatctcaaccgcccttcccctgacgcagctgcgctgggtcaagcagacaaacaccgagaagaaggccagtgtggtaaccttacctgtctacctgaacttcacccgtgcagacctcatcttcaccgtggacttcgaaattgctacaaaggaggatcctcgcagcttctacgagcggggtgtcgcagtcttgtgcacagagtaaacttttctagctgcccctttctgtaatagtgaaagttggtatttaacatttattcatttttaaaatatttggaaggtctgagcttgtgaaaagaaagtggttggtctgaggttggaggaagctgaatggaatctgacggttgggagtggtggaaattggaaggataccaggaggtatttgggaaggccaatggcgtggctcctttgaggaaataaaacactaagcatgagccgg

SEQ ID NO: 545 - DNA, 886 bp, human; identical to SEQ ID NO: 493

SEQ ID NO: 546 - DNA, 2709 bp, human
gggtcctgtcccatccatcctgacctgttccatctcagccccaggactcagtactgcggttgccaacactgctgccaggcatgatggatgggccacgttccgatgtgggccgttggggtggcaaccccttgcagccccctaccacgccatctccagagccagagccagagccagacggacgctctcgcagaggaggaggccgttccttctgggctcgctgctgtggctgctgttcatgccgaaatgcggcagatgacgactggggacctgaaccctctgactccaggggtcgagggtccagctctggcactcgaagacctggctcccggggctcagactcccgccggcctgtatcccggggcagcggtgtcaatgcagctggagatggcaccatccgagagggcatgctagtagtgaacggtgtggacttgctgagctcgcgctcggaccagaaccgccgagagcaccacacagacgagtatgagtacgacgagctgatagtgcgccgcgggcagcctttccatatgctcctcctcctgtcccggacctatgaatcctctgatcgcatcacccttgagttactcatcggaaacaaccccgaggtgggcaagggcacgcacgtgatcatcccagtgggcaaggggggcagtggaggctggaaagcccaggtggtcaaggccagtgggcagaatctgaacctgcgggtccacacttcccccaacgccatcatcggcaagtttcagttcacagtccgcacacaatcagacgctggggagttccagttgccctttgacccccgcaatgagatctacatcctcttcaacccctggtgcccagaggacattgtgtacgtggaccatgaggattggcggcaggagtatgttcttaatgagtctgggagaatttactacgggaccgaagcacagattggtgagcggacctggaactacggccagtttgaccacggggtgctggatgcctgcttatacatcctggaccggcgggggatgccatatggaggccgtggagacccagtcaatgtctcccgggtcatctctgccatggtgaactccctggatgacaatggagtcctgattgggaactggtctggtgattactcccgaggcaccaacccatcagcgtgggtgggcagcgtggagatcctgcttagctacctacgcacgggatattccgtcccctatggccagtgctgggtctttgctggagtgaccaccacagtgctgcgctgcctgggtctggccacccgtactgtcaccaacttcaactccgcccacgacacagacacatcccttaccatggacatctacttcgacgagaacatgaagcccctggagcacctgaaccatgattctgtctggaacttccatgtgtggaacgactgctggatgaagaggccggatctgccctcgggctttgatgggtggcaggtggtggatgccacaccccaagagactagcagtggcatcttctgctgcggcccctgctctgtggagtccatcaagaatggcctggtctacatgaagtacgacacgcctttcatttttgctgaggtgaatagtgacaaggtgtactggcagcggcaggatgatggcagcttcaagattgtttatgtggaggagaaggccatcggcacactcattgtcacaaaggccatcagctccaacatgcgggaggacatcacctacctctataagcacccagaaggctcagacgcagagcggaaggcagtagagacagcagcagcccacggcagcaaacccaatgtgtatgccaaccggggctcagcggaggatgtggccatgcaggtggaggcacaggacgcggtgatggggcaggatctgatggtctctgtgatgctgatcaatcacagcagcagccgccgcacagtgaaactgcacctctacctctcagtcactttctatactggtgtcagtggtaccatcttcaaggagaccaagaaggaagtggagctggcaccaggggcctcggaccgtgtgaccatgccagtggcctacaaggaataccggccccatcttgtggaccagggggccatgctgctcaatgtctcaggccacgtcaaggagagcgggcaggtgctggccaagcagcacaccttccgtctgcgcaccccagacctctccctcacgttactgggagcagcagtggttggccaggagtgtgaagtacagattgtcttcaagaacccccttcccgtcaccctcaccaatgtcgtcttccggctcgaaggctctgggttacagaggcccaagatcctcaacgttggggacattggaggcaatgaaacagtgacactgcgccagtcgtttgtgcctgtgcgaccaggcccccgccagctcattgccagcttggacagcccacagctctcccaggtgcacggtgtcatccaggtggatgtggccccagcccctggggatgggggcttcttctcagacgctggaggtgacagtcacttaggagagaccatccctatggcatctcgaggtggagcttagccctgtgccaggagcaatgggactggagtcagatgagcaaggacattgccccaagataggggcacactacagagcagctccccaggagctcaggtggggagtccagggctcccggagagggagtcagtcttcacttgcactgggggaacagatgctaataaactgttttttaatg

SEQ ID NO: 547 - DNA, 1414 bp, human
gggtttgaagaccttcagcgttgccctggcggacagagacaggccctcggggtggaggtctttggtttcataagagcctgagagagatttttctaagatatgtgtaacacaccaacgtactgtgacctaggaaaggctgctaaggatgtcttcaacaaaggatatggctttggcatggtcaagatagacctgaaaaccaagtcttgtagtggagtggaattttctacttctggtcatgcttacactgatacagggaaagcatcaggcaacctagaaaccaaatataaggtctgtaactatggacttaccttcacccagaaatggaacacagacaatactctagggacagaaatctcttgggagaataagttggctgaagggttgaaactgactcttgataccatatttgtaccgaacacaggaaagaagagtgggaaattgaaggcctcctataaacgggattgttttagtgttggcagtaatgttgatatagatttttctggaccaaccatctatggctgggctgtgttggccttcgaagggtggcttgctggctatcagatgagttttgacacagccaaatccaaactgtcacagaataatttcgccctgggttacaaggctgcggacttccagctgcacacacatgtgaacgatggcactgaatttggaggttctatctaccagaaggtgaatgagaagattgaaacatccataaaccttgcttggacagctgggagtaacaacacccgttttggcattgctgctaagtacatgctggattgtagaacttctctctctgctaaagtaaataatgccagcctgattggactgggttatactcagacccttcgaccaggagtcaaattgactttatcagctttaatcgatgggaagaacttcagtgcaggaggtcacaaggttggcttgggatttgaactggaagcttaatgtggtttgaggaaagcatcagatttgtccctggaagtgaagagaaatgaacccactatgttttggccttaaaattcttctgtgaaatttcaaaagtgtgaactttttattcttccaaagaattgtaatcctccccacactgaagtctaggggttgcgaatccctcctgagggagatgcttgaaggcatgcctggaagttgtcatgtttgtgccacgtttcagttcagttctgaagtgttattaaatgtgttcctcagcgacagtgtagcgtcatgttagaggagacgatctgacccaccagtttgtacatcacgtcctgcatgtcccacaccattttttcatgaccttgtaatatactggtctctgtgctatagtggaatctttggttttgcatcatagtaaaataaaataaacccatcacatttggaacataaaaaaaaaaaaaaaaaaaaaaaaaaaaaa

SEQ ID NO: 548 - DNA, 1672 bp, human
ggcggcggccggctcccgcaggcgccgaggcaggcgagcccccggccccaggcgcccgggccccgccgccgcccgcgcgcggcgcggcattttattcaggcgacgcttaagggagccggccgcgcccggtgcattgtgggaggcccgcggccgttttcgggaggaaggcggaggggccaaagcgagccggtggatccataaagaacccagccaacccgcagagggaggggaggggctgagctgtgaggagagcggggcccaagaaccatgtctacgcgggagtcctttaacccggaaagttacgaattggacaaaagcttccggctaaccagattcactgaactgaagggcacaggctgcaaagtgccccaagatgtcctgcaaaaattgctggaatctttacaggagaaccacttccaagaagatgagcagtttctgggagccgttatgccaaggcttggcattggaatggatacttgtgtcattcctttgaggcacggtgggctttccttggttcaaaccacagattacatttacccgatcgtagacgacccttacatgatgggcaggatagcgtgtgccaatgtcctcagtgacctctatgcaatgggggtcacggaatgtgacaatatgctgatgctccttggagtcagtaataaaatgaccgacagggaaagggataaagtgatgcctctgattatccaaggttttaaagacgcagctgaggaagcaggaacgtctgtaacaggcggccaaacagtactaaacccctggattgtcctgggaggagtggctaccactgtctgccaacccaatgaatttatcatgccagacaatgcagtgccaggggacgtgctggtgctgacaaaacccctggggacacaggtggcagtggctgtgcaccagtggctggatatccctgagaaatggaataagattaaactagtggtcacccaagaagatgtagagctggcctaccaggaggcgatgatgaacatggcgaggctcaacaggacagctgcaggactcatgcacacgttcaatacccacgccgccactgacatcacgggcttcgggattttgggccatgcgcagaacctggccaagcagcagaggaacgaggtgtcgtttgtaattcacaacctcccggtgctggccaagatggctgcggtgagcaaggcctgcggaaacatgttcggcctcatgcacgggacctgcccggagacttcaggcggccttctgatctgtttaccacgtgagcaagcagctcggttctgtgcagagataaagtcccccaaatatggtgaaggccaccaagcatggattattgggattgtagagaagggcaaccgcacagccagaatcatagacaaaccccggatcatcgaggtcgcacacaagtggccactcaaaacgtgaatcccacacccggggccacctcttaatctagacagaaatagctgtttggttttgtttttaaatagatctatttcccttatcacttcaattaaagactataaacaacaaaaatctcattgtgtctacacatcggggtgaccttaggtcggtttgtaagtggatacaattaataaaataaaatccattgcctttttttcctgttacattaactgaagatcgacctaatcttgaggcagcttctgagttgagaatt

SEQ ID NO: 549 - DNA, 1882 bp, human
gttggctggaggggctgctgctgggaacacctggagtctccgcgggcagatctcatattttggattctggatatattataatgagtgacactttgacagcggatgtcattggtcgaagagttgaagttaatggagaacatgcaacagtacgttttgctggtgttgtccctcccgtggcaggaccctggttaggagtagaatgggacaatcccgagagaggaaagcatgatgggagccacgaagggactgtgtattttaaatgcaggcacccgacaggaggatcctttattcgtccgaacaaggtaaattttggaacagactttcttactgcaattaagaaccgctatgtgttagaagatggaccagaggaagatagaaaagagcaaattgttacaattggaaataaacctgtggagactatcggttttgactctattatgaaacagcaaagtcagctgagcaagttgcaagaagtttctctgaggaactgtgcagtaagttgtgctggtgaaaaaggaggagttgctgaagcatgtcctaatatcagaaaggtagatttgtcaaaaaacctgttgtcatcatgggatgaagtgatacacattgctgatcagctcagacacctggaagtccttaatgtcagtgaaaataaactaaaatttccctccggttcagtattaactggaacgctttctgtactgaaggttttagtcctcaatcaaacaggaataacgtgggctgaggtgctgcggtgtgtcgcggggtgcccaggcctggaggaactctaccttgagtctaacaacattttcatttccgaaaggccaacagatgttctccagacagtcaagttattagatctttcctctaatcaattaattgatgaaaatcagctgtatctgatagcccacctgcccaggttagaacaattaatcctctctgacactggaatttcttctctacattttccggatgctggaattgggtgcaaaacgtccatgttcccatccttgaagtacctggtagtaaacgacaatcagatatcacaatggtcgtttttcaatgagctagagaagttaccaagtctacgggctttgtcctgcctaagaaaccccctgaccaaagaggacaaagaagcagagacggcgcgactactcattatcgccagcattggccagctgaagacgctgaacaaatgtgagattctccccgaggagaggcggagagctgagcttgactaccgaaaagcttttggaaatgagtggaaacaggctggtggacataaggatccggaaaaaaacagactcagcgaagaattcctcacagcccatcccagataccagttcctctgcctgaaatatggtgcacctgaagattgggaactcaaaacacagcaaccacttatgctgaaaaaccagctactaacactgaagataaaataccctcatcaacttgatcagaaagtcctggagaaacaactgccgggctccatgacaattcaaaaggtgaagggattgctgtcacgtcttctcaaagttcctgtgtcagaccttctgttgtcctatgaaagtcccaaaaagccgggcagagaaatcgagctggaaaatgacctaaagtcattacagttttattctgtggaaaatggagattgtctattagtgcgatggtgacaaccaactaataaaatttaaagaccacactgcttatcgtgtctggggttcaccggaaataaatgattcactggaacaattctactgtcaaaacaaagggggtttacaacttgtcctaagtataacaagggatgtatttttagttgggaagtgaccatttctaggcttatacataatagcaataataaaggctttgaacctacagaaaaaaaaaaaaa

SEQ ID NO: 550 - DNA, 3164 bp, human
cggcctcagaaagccgagtgaggagttggccgtagtgagagggaccgatcccttggggccgccggcggcgaggccgagccgctcctcccaatggcgaagaagacgtacgacctgcttttcaagctgctcctgatcggggattccggagtggggaagacctgcgtcctttttcgtttttcggatgatgccttcaatactacctttatttccaccataggaatagacttcaagatcaaaacagttgaattacaaggaaagaagatcaagctacagatatgggatacagcaggccaggagcgatttcacaccatcacaacctcctactacagaggcgcaatgggtatcatgctagtatatgacatcaccaatggtaaaagttttgaaaacatcagcaaatggcttagaaacatagatgagcatgccaatgaagatgtggaaagaatgttactaggaaacaagtgtgatatggacgacaaaagagttgtacctaaaggaaaaggagaacagattgcaagggagcatggtattaggttttttgagactagtgcaaaagcaaatataaacatcgaaaaggcgttcctcacgttagctgaagatatccttcgaaagacccctgtaaaagagcccaacagtgaaaatgtagatatcagcagtggaggaggcgtgacaggctggaagagcaaatgctgctgagcattctcctgttccatcagttgccatccactaccccgttttctcttcttgctgcaaaataaaccactctgtccatttttaactctaaacagatatttttgtttctcatcttaactatccaagccacctattttatttgttctttcatctgtgactgcttgctgactttatcataattttcttcaaacaaaaaaatgtatagaaaaatcatgtctgtgacttcatttttaaatgtacttgctcagctcaactgcatttcagttgtattatagtccagttcttatcaacattaaaacctatagcaatcatttcaaatctattctgcaaattgtataagaataaagttagaattaacaattttattttgtacaacagtggaattttctgtcatggataatgtgcttgagtccctataatctatagacatgtgatagcaaaagaaacaaacaaaagccaggaaaacactcattttcgccttgaatatgtaaatgggattaattttgtcctgtgccttatgtggaaagggacttctttgggttttccttttttgttctggtggaagcatgtgcagggagaccatatcatccaaaccataaacccattaaaatgtttgtggtttgcttggctgtaattttcaaagtagttaattgaggacaaagggtaatgcagaagtgatagctttggtttgctgagtcttgttttaagtggccttgatatttaaaactattcctgccaccatttcttctccttggccacttcttccttgcgtctccctgcatgctgctttatttgcttctccctccccaaccacctcatggtatatttaagagtgaaagggacaaactagtaggtttgtcaagtttaatataaagcactgatgtaacttgctaggtaaacggaaagataagttctaactgcctactatccaatgtcagttaattggtgtcttcccccctcatttgctctcttccctaaaatgtgtcccagatgccttcatttgctgttttacttctatgttctgcttttcctcctctctttgttcccttcctgtctatccattgagtttatgaaatggaagagttaactgcatgcactagtgtttggagggtgttgtggtttgtctttctaattaggtgtatagcctattcactttcctaggaataaatctcttaacctaaatttgagtagtctgcattttggcaactcctctaagcagcttggtagcctaagtacaggttgtttttttaaaaaaggaaaagcaggaaggaggagtgaattttattaacatgtttgccaaatgtattgagatttggcctctgaagaacactttttcagtgttaagtttctttaccttaagattccgaaatactttagaatattattaattttaagtcctgtctttacatccttttggaaaacttgtattaccatgagtttggaaaaaggacaacgaaaggcttttcatgtaaagataagatctttagctatctctaaccctgtccttttttcactgcattttttctagttttgcttcattgcttatcattaggatagggtaagtgaagtttgctatgctgctagcatcctaagatgatacctttgttgaaagaattgtgaatagcatgattcatttctagcagaggctgagtttaggacagcagcttccattgagaagtctttctgtgtcgtgaatagcattttaatgacctcttggctcacataagcaaacaacatagggacgtatctgctatgaaaatccacaaatttttcagatagtgccctaaaaacaattttatatgcctcactggttgttattcttaggttattcccacacttgactttatcattgtttactactagtaaaaagcagcattgccaaataatccctaattttccactaaaaatataatgaaatgatgttaagctttttgaaaagtttaggttaaacctactgttgttagattaatgtatttgttgcttccctttatctggaatgtggcattagcttttttattttaaccctctttaattcttattcaattccatgacttaaggttggagagctaaacactgggatttttggataacagactgacagttttgcataattataatcggcattgtacatagaaaggatatggctaccttttgttaaatctgcactttctaaatatcaaaaaagggaaatgaagtataaatcaatttttgtataatctgtttgaaacatgagttttatttgcttaatattagctttgccccttttctgtaagtctcttgggatcctgtgtagaagctgttctcattaaacaccaaacagttaagtccattctctggtactagctacaaattcggtttcatattctacttaacaatttaaataaactgaaatatttctagatggtctacttctgttcatataaaaacaaaacttgatttccaaaaaaaaaaaaaaaaaaaaaaaaaaaaaaaaa

SEQ ID NO: 551 - DNA, 3851 bp, human
agactggggtgggggaggggttcaggcctgttccccgcggctgcggcagcaccagggccggccgccaccgcctctagaacgcggaggaggtgggtcctgggaagcgggatgtccatcgctccagcttggtggtgaatgctgaggagagtcactgttgctgcagtctgtgccacccggaggaagttgtgtgaggccgggcgggacgtcgcggcgctctggggaatcgaaacgcggggtcggtgcgaagactctgctgctgccagaccctttcctattctggccatgcctggaaggaacaaggcgaagtctacctgcagctgccctgacctgcagcccaatggacaggatctgggcgagaacagccgggttgcccgtctaggagcggatgaatctgaggaagagggacggagggggtctctcagtaatgctggggaccctgagatcgtcaagtctcccagcgaccccaagcaataccgatacatcaaattacagaatggcctacaggcacttctgatttcagacctaagtaatatggaaggtaaaacaggaaatacaacagatgatgaagaagaagaggaggtggaggaagaagaagaagatgatgatgaagattctggagctgaaatagaagatgacgatgaagagggttttgatgatgaagatgagtttgatgatgaacatgatgatgatcttgatactgaggataatgaattggaagaattagaagagagagcagaagctagaaaaaaaactactgaaaaacagcaattgcagagcctgtttttgctgtggtcaaagctgactgatagactgtggtttaagtcaacttattcaaaaatgtcttcaaccctgctggtcgagacaagaaatctttatggggtagttggagctgaaagcaggtctgcacctgttcagcatttggcaggatggcaagcggaggagcagcagggtgaaactgacacagttctgtctgcagcggctctttgtgttggagttgggagtttcgctgatccagatgacctgccggggctggcacactttttggagcacatggtattcatgggtagtttgaaatatccagatgagaatggatttgatgccttcctgaagaagcatgggggtagtgataatgcctcaactgattgtgaacgcactgtctttcagtttgatgtccagaggaagtacttcaaggaagctcttgatagatgggcgcagttcttcatccacccactaatgatcagagatgcaattgaccgtgaagttgaagctgttgatagtgaatatcaacttgcaaggccttctgatgcaaacagaaaggaaatgttgtttggaagccttgctagacctggccatcctatgggaaaatttttttggggaaatgctgagacgctcaagcatgagccaagaaagaataatattgatacacatgctagattgagagaattctggatgcgttactactcttctcattacatgactttagtggttcaatccaaagaaacactggatactttggaaaagtgggtgactgaaatcttctctcagataccaaacaatgggttacccagaccaaactttggccatttaacggatccatttgacacaccagcatttaacaaactttatagagttgttccaatcagaaaaattcatgctctgaccatcacatgggcacttcctcctcaacagcaacattacagggtgaagccacttcattatatatcctggctggttggacatgaaggcaaaggcagcattctttctttccttaggaaaaaatgctgggctcttgcactgtttggtggaaatggtgagacaggatttgagcaaaattctacttattcagtgttcagcatttctattacattgactgatgagggttatgaacatttttatgaggttgcttacactgtctttctgtatttaaaaatgctgcagaagctaggcccagaaaaaagaatttttgaagagattcggaaaattgaggataatgaatttcattaccaagaacagacagatccagttgagtatgtggaaaacatgtgtgagaacatgcagctgtacccattgcaggacattctcactggagatcagcttctttttgaatacaagccagaagtcattggtgaagccttgaatcagctagttcctcaaaaagcaaatcttgttttactgtctggtgctaatgagggaaaatgtgacctcaaggagaaatggtttggaactcaatatagtatagaagatattgaaaactcttgggctgaactgtggaatagtaatttcgaattaaatccagatcttcatcttccagctgaaaacaagtacatagccacggactttacgttgaaggctttcgattgcccggaaacagaatacccagttaaaattgtgaatactccacaaggttgcctgtggtataagaaagacaacaaattcaaaatccccaaagcatatatacgtttccatctaatttcaccgttgatacagaaatctgcagcaaatgtggtcctctttgatatctttgtcaatatccttacgcataaccttgcggaaccagcttatgaagcagatgtggcacagctggagtataaactggcagctggagaacatggtttaattattcgagtgaaaggatttaaccacaaactacctctactgtttcagctcattattgactacttagctgagttcaattccacaccagctgtctttacaatgataactgagcagttgaagaagacctactttaacatcctcatcaagcctgagactttggccaaagatgtacggcttttaatcttggaatatgcccgttggtctatgattgacaagtaccaggctttgatggacggcctttcccttgagtctctgctgagcttcgtcaaagaattcaaatcccagctctttgtggagggcctggtacaagggaatgtcacaagcacagaatctatggatttcctgaaatatgttgttgacaaactaaacttcaagcctctggagcaggagatgcctgtgcagttccaggtggtagagctgcccagtggccaccatctatgcaaagtgaaagctctgaacaagggtgatgccaactctgaagtcactgtgtactaccagtcaggtaccaggagtctaagagaatatacgcttatggagctgcttgtgatgcacatggaagaaccttgttttgacttccttcgaaccaagcagacccttgggtaccatgtctaccctacctgtaggaacacatccgggattctaggattttctgtcactgtggggactcaggcaaccaaatacaattctgaagttgttgataagaagatagaagagtttctttctagctttgaggagaagattgagaacctcactgaagaggcattcaacacccaggtcacagctctcatcaagctgaaggagtgtgaggatacccaccttggggaggaggtggataggaactggaatgaagtggttacacagcagtacctctttgaccgccttgcccacgagattgaagcactgaagtcattctcaaaatcagacctggtcaactggttcaaggctcatagagggccaggaagtaaaatgctcagcgttcatgttgttgggtatgggaagtatgaactggaagaggatggatccccttctagtgaggattcaaattcttcttgtgaagtgatgcagctgacctacctgccaacctctcctctgctggcagattgtatcatccccattactgatatcagggctttcacaacaacactcaaccttctcccctaccataaaatagtcaaataaataaactgcagtcacgttggcctgaaaaaaaaaaaaaaaaaaaaaaaaaaaaaaaa

SEQ ID NO: 552 - DNA, 6783 bp, human
atggatggttgctttcagctatgtaacgtttttcgatcccatgagatggaaatcgaccagtgcttgctagagtcccttccccttggccaacggcagcgtctagtgaagcgcatgcgctgtgagcaaatcaaagcctactatgagcgcgagaaggcttttcagaagcaggaagggttcctgaaaaggctgaagcatgcgaagaatccgaaagttcacttcaacctcacggacatgctacaggacgcgattatccaccacaatgacaaagaagtgcttcggctcctgaaggagggggcagacccccacaccctcgtctcctcgggagggtccctgctccatctgtgtgctcggtatgataatgccttcattgcagaaattctgattgacagaggagtcaacgtcaaccaccaggatgaagacttctggacgcccatgcacattgcctgtgcctgcgataaccctgatattgtcctgcttcttgtattagctggagccaatgtccttctccaggatgtgaatggaaatatcccattagattatgctgtagaagggacagaatccagctctatcctgttgacctatctggatgaaaatggagtggatttgacctcactgcgccagatgaagcttcagagaccaatgagtatgttaacagatgtcaaacacttcttatcatctggaggaaatgtcaatgagaaaaacgatgaaggagtaaccctgttacacatggcgtgtgcgagtggctacaaggaggtggtgtctcttatcctggaacatggtggagacctcaacatagtagatgatcagtactggactcccctccacttggcagccaaatatggccagacaaatctggtgaaacttctcctgatgcatcaggcaaacccacacctcgtgaactgtaatgaggagaaggcgtcagatattgctgcctctgagtttattgaggaaatgctgctgaaagccgaaattgcctgggaagaaaaaatgaaagagcctttatctgcttctaccttagctcaagaagagccctatgaagagatcattcacgatcttcccgtactgtcgagtaagctcagtcccctggtgttaccaattgccaagcaagacagtttgttggaaaaagacattatgttcaaagatgcaacaaaaggtctgtgtaagcagcagtctcaggacagcatccctgaaaaccccatgatgagcggttccaccaaacccgagcaggtcaagctaatgcctcctgccccaaacgatgacctggcaacgctcagcgagctcaatgatggcagcctgctctatgagattcagaagcgctttgggaacaatcagatctatacattcattggagacattcttttgcttgttaacccatacaaggagcttccaatttattcttccatggtgtcccagctgtatttcagctcctcagggaagctgtgttcctcgctgcctcctcacctcttctcctgtgtggagagagcctttcaccagctcttccgggaacagcggcctcagtgtttcatcctcagtggagaaaggggatcaggaaagtctgaagccagcaaacaaatcataagacacctcacctgcagggctggcgccagcagggccacactggattccagattcaaacatgtcgtgtgcatcttagaagcctttggacatgccaagaccacacttaatgatttgtccagttgcttcatcaagtattttgaactgcagttctgtgagaggaaacaacagctaaccggagccagaatttatacatatttgctagagaaatccagacttgtttcacaacctcttggccagagcaattttctcattttctacttgttgatggatgggttatctgctgaagaaaaatatggacttcatcttaataatttatgtgcacaccggtatttgaaccagaccatacaggatgatgcatccacaggggagcgttctctgaacagggagaaattggctgttttgaaacgagccctgaatgtagttggcttcagcagcttggaggtggagaatctgttcgtaattctagcagcaatattgcaccttggagacattcggtttactgccctgaatgaggggaactccgccttcgtttctgacctccagctcctggaacaagtggctggaatgttacaagtatcaacagatgaattggcatctgccttaacaactgatattcaatattttaaaggggatatgataatacgacgacataccatacagattgctgagtttttccgagacctcttggccaagtccctgtacagtcgtttgtttagctttttggtgaataccatgaattcttgcctccacagtcaagatgaacagaaaagcatgcagacattggatattggaatattggacatttttggttttgaagagtttcaaaagaatgaatttgaacaactttgtgtcaacatgaccaatgagaagatgcaccactatatcaatgaagtgctttttctccacgagcaagtggaatgtgtacaagagggagttaccatggaaacagcatattctcctggtaaccagaatggagttttggacttttttttccagaagccatctggatttctcaccttattggatgaagaaagtcaaatgatttggtcagtggaatcaaattttccaaaaaaactacaaagtctcctagaatcctcaaacacaaatgcggtgtactcccccatgaaggatgggaatgggaatgttgccctcaaagaccacggtacagccttcaccatcatgcactacgcaggaagggtaatgtatgatgttgttggggcgattgaaaaaaataaagactccctttcacagaatcttctatttgtaatgaaaactagtgaaaatgtcgtgatcaatcatttgttccagtcgaaattgtcacaaacaggatccctcgtatctgcctatccttcctttaaattccgaggacataagtctgccctgctcagtaagaaaatgacagcttcttcaattattggagaaaacaagaattatctagaacttagtaagttattaaaaaagaaaggaacttctacatttcttcaaagattggaacgaggagatccagtcaccatagcatcacaactcaggaaatcactaatggatattattggaaaacttcagaagtgcactccacacttcattcattgcatcaggcccaataactcaaagctgccagatacttttgataatttttacgtgtctgctcagctacaatatattggggtcctggagatggtgaagatcttccgatatggataccctgttcgcctttccttctcggatttcctgtcaaggtataagccactggctgatacattcctgcgtgagaagaaggaacagtcagctgccgagcgatgtcgacttgttctccagcagtgtaaattacaaggctggcagatgggagtccgaaaagtgtttctaaaatactggcatgctgaccaactcaatgatttgtgcctacagttgcagagaaaaattataacctgccaaaaagttatcagaggatttttagcacgccagcacctgcttcagagaataagcatcagacaacaagaggtgacttctatcaatagctttctgcagaacacagaggacatggggctgaaaacctacgatgccctggtcattcagaatgcttcagacattgcccgggaaaatgaccggctccgtagtgaaatgaacgctccctaccataaagagaagttagaggtcaggaacatgcaagaggaaggaagcaaaagaaccgatgacaagagtggacccaggcatttccaccccagctccatgtcagtctgcgcggccgtggatggcctgggccagtgcctcgttggcccgtccatctggtctccttcgctgcactcggtgttcagcatggatgacagcagcagcctcccgtctccacggaaacagcccccgcccaagccaaagagggaccccaacacccggctgagtgcttcctatgaggctgtgagcgcctgcctctccgcggccagggaagcggccaacgaagctctggcccggcccagaccgcacagcgacgactacagcaccatgaagaagattcctcctcgaaagcccaagcgcagccccaacaccaagctcagcggctcctacgaggagatatcggggtcccggcccggggacgcgaggcccgcgggcgccccgggggcagcagcgcgcgttctgacccccgggactccgcagtgcgcgctgcccccggcggcgcctccgggtgacgaggacgacagcgagcctgtgtacatcgagatgctggggcacgcggccaggcccgatagcccggaccccggggagtccgtgtacgaggagatgaagtgttgcctgcccgacgacggcggcccgggcgcgggctccttcctgctccacggcgcatcgccgcccctgctccaccgcgcgccggaggacgaggcggcggggcccccaggggacgcgtgcgacatcccgccgcccttccccaacctgctgccgcaccggccgcccctgctggtgttccccccgacccccgtcacctgctcccccgcctccgacgagtcgcccctgacacccctggaggtgaagaagctgccagtcctggagaccaacctcaagtaccccgtgcagccggaggggtcgagcccgctgtccccgcagtactccaagagccagaagggcgacggcgacaggcccgcgtcccccggcctggcgctgttcaacgggtccggccgagcctccccgccgtccacgccgcccccgcccccgcccccgcccgggccgccccccgcgccctacaggccctgcgcgcacttggccttcccgccggagcccgccccggtgaacgcggggaaagcggggccgagcgcagaggcgcccaaggttcacccaaagccaaactctgcccccgtggccgggccctgcagctccttccccaagatcccatattcccccgtgaaggccaccagggcggacgccaggaaggccggctccagtgcctcgccccccgcgccctacagccctcccagctccaggcctctcagcagccccctggacgagctcgccagcctcttcaactcggggaggagtgtgcttcggaaatccgcggcgggaagaaaaatcagggaagcagaaggttttgaaactaacatgaacataagtagccgagatgaccctagtacgtcagaaattacttccgagactcaagacagaaatgcaaataaccatggaattcagttatctaattcactatctagtgctataactgctgaaaatggaaattccatctcaaatggtttacctgaagaagatggatactcacggttgtctataagtggcacagggacttcgacatttcaaagacacagggacagtcacaccactcaggtaatccatcagctgaggctctcagagaatgaaagtgtggccctgcaggaactcttggactggaggagaaagctctgtgaggaaggacaagactggcagcagatcctgcaccacgctgagcccagggtgcctcccccaccaccttgcaagaagcccagccttctgaagaagccggaaggggcctcctgcaacaggctgccgtctgagctctgggacaccaccatttgatgtggcctgaactgcagacttacaaaatagaactgcctactgattccgggctgcaacaacagaaggctgccttctgacatgcgctggggcttctctccacgcatttagacaaaaaaagcacaggacacagacactaaatatatgagatcccgtgtgtgtgtgtgtgtgtttgtgtgtgtgtgtgtgggttctttcttatccatctcgtggtgatacactctgattttcaagctcctcatttacggctctgtgctacccctaggtagcaagagagaggctgggaaaagtgtggacgtggccagagcgagagagtagcggaggaaaggagcaatccatgcacactctgtacagttgtttttctacggttcaacagtctgtttattgtacttccaatggttttattataatacagtatacgggacatatattttatttctttgtagctacttgtgttttattggtattataaacctgataattatttacatgtttattactgtaattttataaatttatgcaattggtggtgcttcctttcttcaaaatacagattttaaaaaatcatttctagattatttttttcctccacagtccttttttttcacctaacgcacctaaatcttgaaactacattgttgttttagcttcgccagtgtcaccccttgcaaaactatgaattgagccccatgttttaggtgttactcatggatgaggaggctgttctttcctatgccctgtatttctggataagtggattgtgtaccctttagttaaatttcacctcccgacttcagcatagatcacaggaaatcacatggcacacggttaaacacgtatggcttcaaatccatagccggtggtgtaaaatgatcatattcattcaaaggcctacacagtacaaatgagcacgctgccatgtactggtttgagcagtaggggctgcatcgcacagcgctcgtcccccgggacttacactgcatgattccctcactgtatatcctcaaccctcccataatgcaaggccttgttcattgatgtgctttcgtcggctgtcggaaagttctgagcagtggctccagaccaccttgtcttgctacttggaactttttattcataccagcctttgaaaagttactgtgccaataaagaggtacaactgtg

SEQ ID NO: 553 - DNA, 1620 bp, human
tgggtcagtgtcacctccaggatacagacagccccccttcagcccagcccagccaggtctcctacaccgccaccatgccattcggtaacacccacaacaagttcaagctgaattacaagcctgaggaggagtaccccgacctcagcaaacataacaaccacatggccaaggtactgacccttgaactctacaagaagctgcgggacaaggagactccatctggcttcactgtagacgatgtcatccagacaggagtggacaacccaggtcaccccttcatcatgaccgtgggctgcgtggctggtgatgaggagtcctacgaagttttcaaggaactctttgaccccatcatctcggatcgccacgggggctacaaacccactgacaagcacaagactgacctcaaccatgaaaacctcaagggtggagacgacctggaccctaactacgtgctcagcagccgcgtccgcactggccgcagcatcaagggctacacgttgcccccacactgctcccgtggcgagcgccgggcggtggagaagctctctgtggaagctctcaacagcctgacgggcgagttcaaagggaagtactaccctctgaagagcatgacggagaaggagcagcagcagctcatcgatgaccacttcctgttcgacaagcccgtgtccccgctgctgctggcctcaggcatggcccgcgactggcccgacgcccgtggcatctggcacaatgacaacaagagcttcctggtgtgggtgaacgaggaggatcacctccgggtcatctccatggagaaggggggcaacatgaaggaggttttccgccgcttctgcgtagggctgcagaagattgaggagatctttaagaaagctggccaccccttcatgtggaaccagcacctgggctacgtgctcacctgcccatccaacctgggcactgggctgcgtggaggcgtgcatgtgaagctggcgcacctgagcaagcaccccaagttcgaggagatcctcacccgcctgcgtctgcagaagaggggtacaggtggcgtggacacagctgccgtgggctcagtatttgacgtgtccaacgctgatcggctgggctcgtccgaagtagaacaggtgcagctggtggtggatggtgtgaagctcatggtggaaatggagaagaagttggagaaaggccagtccattgacgacatgatccccgcccagaagtaggcgcctgcccacctgccaccgactgctggaacccagccagtgggagggcctggcccaccagagtcctgctccctcactcctcgccccgccccctgtcccagagtcccacctgggggctctctccacccttctcagagttccagtttcaaccagagttccaaccaatgggctccatcctctggattctggccaatgaaatatctccctggcagggtcctcttcttttcccagagctccaccccaaccaggagctctagttaatggagagctcccagcacactcggagcttgtgctttgtctccacgcaaagcgataaataaaagcattggtggccttaaaaaaaaaaaaaaaaaaaaaaaaaaaaaaaaaaaaaaaaaaaaaaaaaaaaaaaaaaaaaaaa

SEQ ID NO: 554 - DNA, 2438 bp, human
gcggcgcgctcctggcgaggacggagcgagcagatctcgcgtgcgctcgccgcccggcgcagcccagcccggcccccgcctggcgccgcgagccgaggtgtctcccgcgcccgcgcccgtgtcgccgccgtgcccgcgagcgggagccggagtcgccgccgcccgagcgcagccgagcgcacgccgagcccgtccgccgccgccatggccaccacggtgacctgcacccgcttcaccgacgagtaccagctctacgaggatattggcaagggggctttctctgtggtccgacgctgtgtcaagctctgcaccggccatgagtatgcagccaagatcatcaacaccaagaagctgtcagccagagatcaccagaagctggagagagaggctcggatctgccgccttctgaagcattccaacatcgtgcgtctccacgacagcatctccgaggagggcttccactacctggtcttcgatctggtcactggtggggagctctttgaagacattgtggcgagagagtactacagcgaggctgatgccagtcactgtatccagcagatcctggaggccgttctccattgtcaccaaatgggggtcgtccacagagacctcaagccggagaacctgcttctggccagcaagtgcaaaggggctgcagtgaagctggcagacttcggcctagctatcgaggtgcagggggaccagcaggcatggtttggtttcgctggcacaccaggctacctgtcccctgaggtccttcgcaaagaggcgtatggcaagcctgtggacatctgggcatgtggggtgatcctgtacatcctgctcgtgggctacccacccttctgggacgaggaccagcacaagctgtaccagcagatcaaggctggtgcctatgacttcccgtcccctgagtgggacaccgtcactcctgaagccaaaaacctcatcaaccagatgctgaccatcaaccctgccaagcgcatcacagcccatgaggccctgaagcacccgtgggtctgccaacgctccacggtagcatccatgatgcacagacaggagactgtggagtgtctgaaaaagttcaatgccaggagaaagctcaagggagccatcctcaccaccatgctggccacacggaatttctcagtgggcagacagaccaccgctccggccacaatgtccaccgcggcctccggcaccaccatggggctggtggaacaagccaagagtttactcaacaagaaagcagatggagtcaagccccagacgaatagcaccaaaaacagtgcagccgccaccagccccaaagggacgcttcctcctgccgccctggagcctcaaaccaccgtcatccataacccagtggacgggattaaggagtcttctgacagtgccaataccaccatagaggatgaagacgctaaagcccccagggtccccgacatcctgagctcagtgaggaggggctcgggagccccagaagccgaggggcccctgccctgcccatctccggctccctttagccccctgccagccccatcccccaggatctctgacatcctgaactctgtgagaaggggttcaggaaccccagaagccgagggccccctctcagcggggcccccgccctgcctgtctccggctctcctaggccccctgtcctccccgtcccccaggatctctgacatcctgaactctgtgaggaggggctcagggaccccagaagccgagggcccctcgccagtggggcccccgccctgcccatctccgactatccctggccccctgcccaccccatcccggaagcaggagatcattaagaccacggagcagctcatcgaggccgtcaacaacggtgactttgaggcctacgcgaaaatctgtgacccagggctgacctcgtttgagcctgaagcactgggcaacctggttgaagggatggacttccacagattctacttcgagaacctgctggccaagaacagcaagccgatccacacgaccatcctgaacccacacgtgcacgtcattggagaggatgccgcctgcatcgcttacatccggctcacgcagtacattgacgggcagggccggccccgcaccagccagtctgaggagacccgcgtgtggcaccgccgcgacggcaagtggcagaacgtgcacttccactgctcgggcgcgcctgtggccccgctgcagtgaagagctgcgccctggtttcgccggacagagttggtgtttggagcccgactgccctcgggcacacggcctgcctgtcgcatgtttgtgtctgcctcgttccctcccctggtgcctgtgtctgcagaaaaacaagaccagatgtgatttgttaaaaaaaaacaaaaaaaaaaaaaaaaaaaacaagatgacgacgacaaccacaaaaaaaattgacatcagatgaaatgaaaaaa

SEQ ID NO: 555 - DNA, 2236 bp, human
gctgttgcaacactgcctcactcttcccctcccaccttctctcccctcctctctgctttaattttctcagaattctctggactgaggctccagttctggcctttggggttcaagatcactgggaccaggccgtgatctctatgcccgagtctcaaccctcaactgtcaccccaaggcacttgggacgtcctggacagaccgagtcccgggaagccccagcactgccgctgccacactgccctgagcccaaatgggggagtgagaggccatagctgtctggcatgggcctctccaccgtgcctgacctgctgctgccactggtgctcctggagctgttggtgggaatatacccctcaggggttattggactggtccctcacctaggggacagggagaagagagatagtgtgtgtccccaaggaaaatatatccaccctcaaaataattcgatttgctgtaccaagtgccacaaaggaacctacttgtacaatgactgtccaggcccggggcaggatacggactgcagggagtgtgagagcggctccttcaccgcttcagaaaaccacctcagacactgcctcagctgctccaaatgccgaaaggaaatgggtcaggtggagatctcttcttgcacagtggaccgggacaccgtgtgtggctgcaggaagaaccagtaccggcattattggagtgaaaaccttttccagtgcttcaattgcagcctctgcctcaatgggaccgtgcacctctcctgccaggagaaacagaacaccgtgtgcacctgccatgcaggtttctttctaagagaaaacgagtgtgtctcctgtagtaactgtaagaaaagcctggagtgcacgaagttgtgcctaccccagattgagaatgttaagggcactgaggactcaggcaccacagtgctgttgcccctggtcattttctttggtctttgccttttatccctcctcttcattggtttaatgtatcgctaccaacggtggaagtccaagctctactccattgtttgtgggaaatcgacacctgaaaaagagggggagcttgaaggaactactactaagcccctggccccaaacccaagcttcagtcccactccaggcttcacccccaccctgggcttcagtcccgtgcccagttccaccttcacctccagctccacctatacccccggtgactgtcccaactttgcggctccccgcagagaggtggcaccaccctatcagggggctgaccccatccttgcgacagccctcgcctccgaccccatccccaacccccttcagaagtgggaggacagcgcccacaagccacagagcctagacactgatgaccccgcgacgctgtacgccgtggtggagaacgtgcccccgttgcgctggaaggaattcgtgcggcgcctagggctgagcgaccacgagatcgatcggctggagctgcagaacgggcgctgcctgcgcgaggcgcaatacagcatgctggcgacctggaggcggcgcacgccgcggcgcgaggccacgctggagctgctgggacgcgtgctccgcgacatggacctgctgggctgcctggaggacatcgaggaggcgctttgcggccccgccgccctcccgcccgcgcccagtcttctcagatgaggctgcgcccctgcgggcagctctaaggaccgtcctgcgagatcgccttccaaccccacttttttctggaaaggaggggtcctgcaggggcaagcaggagctagcagccgcctacttggtgctaacccctcgatgtacatagcttttctcagctgcctgcgcgccgccgacagtcagcgctgtgcgcgcggagagaggtgcgccgtgggctcaagagcctgagtgggtggtttgcgaggatgagggacgctatgcctcatgcccgttttgggtgtcctcaccagcaaggctgctcgggggcccctggttcgtccctgagcctttttcacagtgcataagcagttttttttgtttttgttttgttttgttttgtttttaaatcaatcatgttacactaatagaaacttggcactcctgtgccctctgcctggacaagcacatagcaagctgaactgtcctaaggcaggggcgagcacggaacaatggggccttcagctggagctgtggacttttgtacatacactaaaattctgaagttaaagctctgctcttggaaaaaaaaaaaaaaaaaaaaaaaaaaaaaaaaa

SEQ ID NO: 556 - DNA, 2693 bp, human
cggagcgtgggccgccccctcgcacttccgtgtgccgcggcgccggagcccgaggcggctgtagcccacatctcccgagcgacccccggcgcccgcccgccgcgcggaggcccgggccacacctcactggccgcttggcccatcccagtcagcgccgcgccgaaccccgtccgcgcgcgccggggagcggcgcccccgccgctgccgccgcgacccttggcgcctgcccctgcaacgggaggtctgcagggaactggccaggcaagggggcaggcccgtttctcctggtggttggtgcgttgtagcagcagcgggagccaggactaaggacaagcaggagctgggagccccagccccactgcaggccccaccatggcgccgttcctgcgcatcgccttcaactcctatgagctgggctccctgcaggccgaggacgaggcgaaccagcccttctgtgccgtgaagatgaaggaggcgctcagcacagagcgtgggaaaacactggtgcagaagaagccgaccatgtatcctgagtggaagtcgacgttcgacgcccacatctatgaggggcgcgtcatccagattgtgctaatgcgggcagcagaggagccagtgtctgaggtgaccgtgggtgtgtcggtgctggccgagcgctgcaagaagaacaatggcaaggctgagttctggctggacctgcagcctcaggccaaggtgttgatgtctgttcagtatttcctggaggacgtggattgcaaacagtctatgcgcagtgaggacgaggccaagttcccaacgatgaaccgccgcggagccatcaaacaggccaaaatccactacatcaagaaccatgagtttatcgccaccttctttgggcaacccaccttctgttctgtgtgcaaagactttgtctggggcctcaacaagcaaggctacaaatgcaggcaatgtaacgctgccatccacaagaaatgcatcgacaagatcatcggcagatgcactggcaccgcggccaacagccgggacactatattccagaaagaacgcttcaacatcgacatgccgcaccgcttcaaggttcacaactacatgagccccaccttctgtgaccactgcggcagcctgctctggggactggtgaagcagggattaaagtgtgaagactgcggcatgaatgtgcaccataaatgccgggagaaggtggccaacctctgcggcatcaaccagaagcttttggctgaggccttgaaccaagtcacccagagagcctcccggagatcagactcagcctcctcagagcctgttgggatatatcagggtttcgagaagaagaccggagttgctggggaggacatgcaagacaacagtgggacctacggcaagatctgggagggcagcagcaagtgcaacatcaacaacttcatcttccacaaggtcctgggcaaaggcagcttcgggaaggtgctgcttggagagctgaagggcagaggagagtactttgccatcaaggccctcaagaaggatgtggtcctgatcgacgacgacgtggagtgcaccatggttgagaagcgggtgctgacacttgccgcagagaatccctttctcacccacctcatctgcaccttccagaccaaggaccacctgttctttgtgatggagttcctcaacgggggggacctgatgtaccacatccaggacaaaggccgctttgaactctaccgtgccacgttttatgccgctgagataatgtgtggactgcagtttctacacagcaagggcatcatttacagggacctcaaactggacaatgtgctgttggaccgggatggccacatcaagattgccgactttgggatgtgcaaagagaacatattcggggagagccgggccagcaccttctgcggcacccctgactatatcgcccctgagatcctacagggcctgaagtacacattctctgtggactggtggtctttcggggtccttctgtacgagatgctcattggccagtcccccttccatggtgatgatgaggatgaactcttcgagtccatccgtgtggacacgccacattatccccgctggatcaccaaggagtccaaggacatcctggagaagctctttgaaagggaaccaaccaagaggctgggagtgacgggaaacatcaaaatccaccccttcttcaagaccataaactggactctgctggaaaagcggaggttggagccacccttcaggcccaaagtgaagtcacccagagactacagtaactttgaccaggagttcctgaacgagaaggcgcgcctctcctacagcgacaagaacctcatcgactccatggaccagtctgcattcgctggcttctcctttgtgaaccccaaattcgagcacctcctggaagattgaggttcctggacagatcaggctagccctgccctccacccacacctgcccgctccccacgataagcaccagtgggactgtggtgacttctgctgctggccccgcccctgcccccagagcgtccttggctgccgtctggccgggctctcatggtacttcctctgtgaactgtgtgtgaatctgcttttcctctgccttcggagggaaattgtaaatcctgtgtttcattacttgaatgtagttatctattgaaaatatatattatatacatagaaaaaaaaaaaaaaaaaaaa

SEQ ID NO: 557 - DNA, 1841 bp, human
actgcgccgccaccgtcaataggtggaccccctcccggagataaaaccgccggcgccggcgccgccagtccctctggctgagacctcggctccggaatcactgcagcccccctcgccctgagccagagcaccccgggtcccgccagcccctcacactcccagcaaaatgggcaaggagaagacccacatcaacatcgtggtcatcggccacgtggactccggaaagtccaccaccacgggccacctcatctacaaatgcggaggtattgacaaaaggaccattgagaagttcgagaaggaggcggctgagatggggaagggatccttcaagtatgcctgggtgctggacaagctgaaggcggagcgtgagcgcggcatcaccatcgacatctccctctggaagttcgagaccaccaagtactacatcaccatcatcgatgcccccggccaccgcgacttcatcaagaacatgatcacgggtacatcccaggcggactgcgcagtgctgatcgtggcggcgggcgtgggcgagttcgaggcgggcatctccaagaatgggcagacgcgggagcatgccctgctggcctacacgctgggtgtgaagcagctcatcgtgggcgtgaacaaaatggactccacagagccggcctacagcgagaagcgctacgacgagatcgtcaaggaagtcagcgcctacatcaagaagatcggctacaacccggccaccgtgccctttgtgcccatctccggctggcacggtgacaacatgctggagccctcccccaacatgccgtggttcaagggctggaaggtggagcgtaaggagggcaacgcaagcggcgtgtccctgctggaggccctggacaccatcctgccccccacgcgccccacggacaagcccctgcgcctgccgctgcaggacgtgtacaagattggcggcattggcacggtgcccgtgggccgggtggagaccggcatcctgcggccgggcatggtggtgacctttgcgccagtgaacatcaccactgaggtgaagtcagtggagatgcaccacgaggctctgagcgaagctctgcccggcgacaacgtcggcttcaatgtgaagaacgtgtcggtgaaggacatccggcggggcaacgtgtgtggggacagcaagtctgacccgccgcaggaggctgctcagttcacctcccaggtcatcatcctgaaccacccggggcagattagcgccggctactccccggtcatcgactgccacacagcccacatcgcctgcaagtttgcggagctgaaggagaagattgaccggcgctctggcaagaagctggaggacaaccccaagtccctgaagtctggagacgcggccatcgtggagatggtgccgggaaagcccatgtgtgtggagagcttctcccagtacccgcctctcggccgcttcgccgtgcgcgacatgaggcagacggtggccgtaggcgtcatcaagaacgtggagaagaagagcggcggcgccggcaaggtcaccaagtcggcgcagaaggcgcagaaggcgggcaagtgaagcgcgggcgcccgcggcgcgaccctccccggcggcgccgcgctccgaaccccggcccggcccccgccccgcccccgccccgcgcgccgctccggcgccccgcacccccgccaggcgcatgtctgcacctccgcttgccagaggccctcggtcagcgactggatgctcgccatcaaggtccagtggaagttcttcaagaggaaaggcgcccccgccccaggcttccgcgcccagcgctcgccacgctcagtgcccgttttaccaataaactgagcgaccccag

SEQ ID NO: 558 - DNA, 3044 bp, human
ggcgggacctgcggccagccctgggcggccatgtggacagagctgggagggccggaaccagaacccaagcgtgatcctgaaccggagcccgagcctgctgcagagtgtcagcatgctgcgcttcctggcaccccggctgcttagcctccagggcaggaccgcccgctactcctcggcagcagccctcccaagccccattctgaacccagacatcccctacaaccagctgttcatcaacaatgaatggcaagatgcagtcagcaagaagaccttcccgacggtcaaccctaccaccggggaggtcattgggcacgtggctgaaggtgaccgggctgatgtggatcgggccgtgaaagcagcccgggaagccttccgcctggggtccccatggcgccggatggatgcctctgagcggggccggctgctgaaccgcctggcagacctagtggagcgggatcgagtctacttggcctcactcgagaccttggacaatgggaagcctttccaagagtcttacgccttggacttggatgaggtcatcaaggtgtatcggtactttgctggctgggctgacaagtggcatggcaagaccatccccatggatggccagcatttctgcttcacccggcatgagcccgttggtgtctgtggccagatcatcccgtggaacttccccttggtcatgcagggttggaaacttgccccggcactcgccacaggcaacactgtggttatgaaggtggcagagcagacccccctctctgccctgtatttggcctccctcatcaaggaggcaggctttccccctggggtggtgaacatcatcacggggtatggcccaacagcaggtgcggccatcgcccagcacgtggatgttgacaaagttgccttcaccggttccaccgaggtgggccacctgatccagaaagcagctggcgattccaacctcaagagagtcaccctggagctgggtggtaagagccccagcatcgtgctggccgatgctgacatggagcatgccgtggagcagtgccacgaagccctgttcttcaacatgggccagtgctgctgtgctggctcccggaccttcgtggaagaatccatctacaatgagtttctcgagagaaccgtggagaaagcaaagcagaggaaagtggggaacccctttgagctggacacccagcaggggcctcaggtggacaaggagcagtttgaacgagtcctaggctacatccagcttggccagaaggagggcgcaaaactcctctgtggcggagagcgtttcggggagcgtggtttcttcatcaagcctactgtctttggtggcgtgcaggatgacatgagaattgccaaagaggagatctttgggcctgtgcagcccctgttcaagttcaagaagattgaggaggtggttgagagggccaacaacaccaggtatggcctggctgcggctgtgttcacccgggatctggacaaggccatgtacttcacccaggcactccaggccgggaccgtgtgggtaaacacctacaacatcgtcacctgccacacgccatttggagggtttaaggaatctggaaacgggagggagctgggtgaggatgggcttaaggcctacacagaggtaaagacggtcaccatcaaggttcctcagaagaactcgtaagagcagctgtcagggaggcccagtcacagtccagcaattccacaaccaccttgacgaatgcttgccaagctgttttaaagccaagaacaccctttctttgttccaaattaactcttagaagaaaccccacaaataaagcaattcaatcaaggctgttctatttaaatcagagatggggaccaggctcagagttctacctatctaacccccaaccacagcccccttggtggcccatgagttgcttccatgaaatcttaggagtctctggaggacagattaaaaaccagtgatctgtaatttgtagctcttcctgctgatccaaggactttcccatgggtgcgcttgatggtttagtggatcgactcaactcagaacacaagcttggaaagtgttaggggttttgaactaggtggatactaaatctcggccccactcttcattggcttaacctaaaaaccagaggtgcttttccttgtctgtgtgccagttgctggctgttttagttgcttgcccttcattttgctactgattttccttaatttgtgggaaggagtaggcaaagaatatgcttacatgattacacctgtaaagtaagcccaaacatcccaaatgtccgtcaactgatgagtggattaataaaatgtttccatggaatattccttggattactcagccataaaaaggaatgaagtactgacacatgctgtgacatcagtgaaccctgaaaacatccttctcagtgaaacaagccagagagatgtacaaggctacagactgtatgattccatttatatgaaatatacatactaggcaaatccatggagatggaacatagattagtggttgccaggggatagaggagtaattgttagtgggcatgggatttgtttttgggaggttttgaaaatgttctggagttgaacaatagtaatggttgcatgatttggtaaaaatactaaaaactatggaattgtttaattatggtatatgaattaatttctttctttttttcttttttttttttttttttgacacggagtctcactctgtcgcccaggctggagtgcagtggtgtgatctcgtctcactgcaacctccgcctcccagattcaagcgattctcctgtctcagcctcctgagtagctgggattataggtacatgccatcacacctggctaatttttgtatttttagtagagatgaggtttcaccattttggccaggctgatcttgaactcctgacctcaggtgatccacccgcctcagcctcccaaagtgctgggattacaggtgggagccacaacacccggccatgaattaactccgttaaaaaataaacgtatacattctgtgagcaaaaaaaaaaaaaaaaaaaaaa

SEQ ID NO: 559 - DNA, 3089 bp, human
agcagttcctcctaactcctgccagaaacagctctcctcaacatgagagctgcacccctcctcctggccagggcagcaagccttagccttggcttcttgtttctgctttttttctggctagaccgaagtgtactagccaaggagttgaagtttgtgactttggtgtttcggcatggagaccgaagtcccattgacacctttcccactgaccccataaaggaatcctcatggccacaaggatttggccaactcacccagctgggcatggagcagcattatgaacttggagagtatataagaaagagatatagaaaattcttgaatgagtcctataaacatgaacaggtttatattcgaagcacagacgttgaccggactttgatgagtgctatgacaaacctggcagccctgtttcccccagaaggtgtcagcatctggaatcctatcctactctggcagcccatcccggtgcacacagttcctctttctgaagatcagttgctatacctgcctttcaggaactgccctcgttttcaagaacttgagagtgagactttgaaatcagaggaattccagaagaggctgcacccttataaggattttatagctaccttgggaaaactttcaggattacatggccaggacctttttggaatttggagtaaagtctacgaccctttatattgtgagagtgttcacaatttcactttaccctcctgggccactgaggacaccatgactaagttgagagaattgtcagaattgtccctcctgtccctctatggaattcacaagcagaaagagaaatctaggctccaagggggtgtcctggtcaatgaaatcctcaatcacatgaagagagcaactcagataccaagctacaaaaaacttatcatgtattctgcgcatgacactactgtgagtggcctacagatggcgctagatgtttacaacggactccttcctccctatgcttcttgccacttgacggaattgtactttgagaagggggagtactttgtggagatgtactaccggaatgagacgcagcacgagccgtatcccctcatgctacctggctgcagccccagctgtcctctggagaggtttgctgagctggttggccctgtgatccctcaagactggtccacggagtgtatgaccacaaacagccatcaaggtactgaggacagtacagattagtgtgcacagagatctctgtagaaagagtagctgccctttctcagggcagatgatgctttgagaacatactttggccattaccccccagctttgaggaaaatgggctttggatgattattttatgttttagggacccccaacctcaggcaattcctacctcttcacctgaccctgcccccacttgccataaaacttagctaagttttgttttgtttttcagcgttaatgtaaaggggcagcagtgccaaaatataatcagagataaagcttaggtcaaagttcatagagttcccatgaactatatgactggccacacaggatcttttgtatttaaggattctgagattttgcttgagcaggattagataagtctgttctttaaatttctgaaatggaacagatttcaaaaaaaattcccacaatctagggtgggaacaaggaaggaaagatgtgaataggctgatggggaaaaaaccaatttacccatcagttccagccttctctcaaggagaggcaaagaaaggagatacagtggagacatctggaaagttttctccactggaaaactgctactatctgtttttatatttctgttaaaatatatgaggctacagaactaaaaattaaaacctctttgtgtcccttggtcctggaacatttatgttccttttaaagaaacaaaaatcaaactttacagaaagatttgatgtatgtaatacatatagcagctcttgaagtatatatatcatagcaaataagtcatctgatgagaacaagctatttgggcacaacacatcaggaaagagagcaccacgtgatggagtttctccagaagctccagtgataagagatgttgactctaaagttgatttaaggccaggcatggtggtttacgcctataatcccagcattttgggactccgaggtgggcagatcacttgagctcaggagctcaagatcagcctgggcaacatggtgaaaccttgtctctacataaaatacaaaaacttagatgggcatggtgctgtgtgcctatagtccactacttgtggggctaaggcaggaggatcacttgagccccggaggtcgaggctacagtgacccaagagtgcactactgtactccagccagggcaagagagcgagaccctgtctcaataaataaataaataaataaataaataaataaataaaaacaaagttgattaagaaaggaagtataggccaggcacagtggctcacacctgtaatccttgcattttggaaggctgaggcaggaggatcactttaggcctggtgtgttcaagaccagcctggtcaacatagtgagacactgtctctaccaaaaaaaggaaggaagggacacatatcaaactgaaacaaaattagaaatgtaattatgttatgttctaagtgcctccaagttcaaaacttattggaatgttgagagtgtggttacgaaatacgttaggaggacaaaaggaatgtgtaagtctttaatgccgatatcttcagaaaacctaagcaaacttacaggtcctgctgaaactgcccactctgcaagaagaaatcatgatatagctttccatgtggcagatctacatgtctagagaacactgtgctctattaccattatggataaagatgagatggtttctagagatggtttctactggctgccagaatctagagcaaagccatcccccctcctggttggtcacagaatgactgacaaagacatcgattgatatgcttctttgtgttatttccctcccaagtaaatgtttgtccttgggtccattttctatgcttgtaactgtcttctagcagtgagccaaatgtaaaatagtgaataaagtcattattaggaagttcaaaaaaaaaaaa

SEQ ID NO: 560 - DNA, 2341 bp, human
ttttatagtgtcagtcagtcaccccacagtctcctctctcttcttttctactgtgctatcctagaatcaaggatttcagcaacaatgcctctgttcaaactcccagctgaagagaaacaaattgatgatgcaatgcgcaactttgctgaaaaagtgtttgcctctgaagtcaaagatgaaggaggtcgtcaggagatttccccctttgatgtggatgagatctgtccgatttctcatcatgagatgcaagcacacatattccatctggagactctgtccacctccacagaagccaggagaaaaaagcgtttccaaggacggaagactgttaatttgtccattccactaagtgaaacatcttccaccaaactgtcccacattgatgaatacatttcctcatctccaacctaccagaccgtgcctgattttcagagagtgcagattactggtgactatgcctctggggttacagttgaagattttgaaattgtttgcaaaggtctgtatcgggcactatgcatacgtgagaaatacatgcagaagtcgtttcagaggttccctaaaaccccttccaaatacttgcggaacattgatggtgaggcttgggtagcaaatgagagcttctatccagtctttactcctcctgtgaagaagggagaggaccccttccgaacagacaaccttcctgaaaacctgggctatcacctcaaaatgaaggacggtgtagtttacgtctatcctaatgaagcagcagtcagcaaagatgagcctaagccacttccttacccaaatctggacaccttcttagacgatatgaattttttacttgctttaattgctcaaggacctgttaagacctatacccaccggcgcctgaagttcctctcctccaagttccaggtccatcagatgcttaacgagatggacgagttaaaggagctgaaaaacaacccccaccgagatttttataactgcaggaaggtggacacccatatccatgcagccgcttgcatgaaccagaaacatctgctgcgttttattaagaaatcttaccaaattgatgctgacagagtggtctatagcaccaaagagaagaatctgaccctaaaggaactttttgctaaattaaaaatgcatccttatgacctgactgttgattctctggatgttcatgctggacgccagaccttccagcgttttgataagttcaatgacaaatataatcctgtaggagcaagtgagctacgggacctctacttgaagacagacaattacattaatggggaatattttgccactatcatcaaggaggtaggtgcggacctggtggaggccaagtaccagcatgctgagccccgcctgtccatctatggccgcagtcctgatgagtggagcaaactctcctcctggttcgtctgcaatcgcatccactgccccaacatgacatggatgatccaggttcccaggatctatgatgtgttccgttccaagaatttccttccacattttggaaaaatgctggagaatattttcatgccagtgtttgaggccaccatcaacccccaggctgacccagaactcagtgtcttcctcaagcatatcactggctttgacagtgtggatgatgagtccaaacacagtggccacatgttctcctccaagagtcccaagccccaggagtggacattggaaaagaatccatcttacacttactatgcctactacatgtatgcaaacatcatggtgctcaacagcctgagaaaggaacgaggcatgaatacgtttctgttccgacctcactgtggagaagctggagccctcacccatctcatgacagcattcatgatagcagatgatatctctcatggcctaaatttaaaaaagagtcccgtgctacagtacttgtttttcttagcccaaattcccatcgccatgtcaccactaagtaacaatagcctatttctagagtatgccaaaaatccttttttggatttccttcagaaagggctaatgatctcactgtctacagatgacccaatgcaattccactttaccaaggagcccctaatggaagaatatgctattgctgcacaagtcttcaagctgagcacctgtgatatgtgcgaagtggcaaggaacagtgtcttgcagtgtggaatttctcatgaggagaaagtaaagtttctgggcgacaattaccttgaggaaggccctgctggaaatgatatccggaggacaaatgtagcccaaatccgcatggcctatcgctatgaaacctggtgttatgaactcaatttaattgctgagggtcttaaatcaacagaataaaaaaaagtaaacc

SEQ ID NO: 561 - DNA, 2341 bp, human; identical to SEQ ID NO: 560

SEQ ID NO: 562 - DNA, 691 bp, human
gacccctcacactcacctagccaccatggacatcgccatccaccacccctggatccgccgccccttctttcctttccactcccccagccgcctctttgaccagttcttcggagagcacctgttggagtctgatcttttcccgacgtctacttccctgagtcccttctaccttcggccaccctccttcctgcgggcacccagctggtttgacactggactctcagagatgcgcctggagaaggacaggttctctgtcaacctggatgtgaagcacttctccccagaggaactcaaagttaaggtgttgggagatgtgattgaggtgcatggaaaacatgaagagcgccaggatgaacatggtttcatctccagggagttccacaggaaataccggatcccagctgatgtagaccctctcaccattacttcatccctgtcatctgatggggtcctcactgtgaatggaccaaggaaacaggtctctggccctgagcgcaccattcccatcacccgtgaagagaagcctgctgtcaccgcagcccccaagaaatagatgccctttcttgaattgcattttttaaaacaagaaagtttccccaccagtgaatgaaagtcttgtgactagtgctgaagcttattaatgctaagggcaggcccaaattatcaagctaataaaatatcattcagcaac

SEQ ID NO: 563 - DNA, 2438 bp, human; identical to SEQ ID NO: 554

SEQ ID NO: 564 - DNA, 5939 bp, human
atagagagactctgcggcccagattcttcaggattctccgtgaagggataaccaggggaagcaccaagatgaccgatgcccagatggctgactttggggcagcggcccagtacctccgcaagtcagagaaggagcgtctagaggcccagacccggccctttgacattcgcactgagtgcttcgtgcccgatgacaaggaagagtttgtcaaagccaagattttgtcccgggagggaggcaaggtcattgctgaaaccgagaatgggaagacggtgactgtgaaggaggaccaggtgttgcagcagaacccacccaagttcgacaagattcaggacatggccatgctgaccttcctgcacgagcccgcggtgcttttcaacctcaaggagcgctacgcggcctggatgatatatacctactcgggcctcttctgtgtcactgtcaacccctacaagtggctgccggtgtacaatgccgaggtggtggccgcctaccggggcaagaagaggagtgaggccccgccccacatcttctccatctccgacaacgcctatcagtacatgctgacagatcgggagaaccagtccatcctcatcacgggagaatccggggcggggaagactgtgaacaccaagcgtgtcatccagtactttgccagcattgcagccataggtgaccgtggcaagaaggacaatgccaatgcgaacaagggcaccctggaggaccagatcatccaggccaaccccgctctggaggccttcggcaatgccaagactgtccggaacgacaactcctcccgctttgggaaattcattaggatccactttggggccactggaaagctggcttctgcagacatagagacctacctgctggagaagtcccgggtgatcttccagctgaaagctgagagaaactaccacatcttctaccagattctgtccaacaagaagccggagttgctggacatgctgctggtcaccaacaatccctacgactacgccttcgtgtctcagggagaggtgtccgtggcctccattgatgactccgaggagctcatggccaccgatagtgcctttgacgtgctgggcttcacttcagaggagaaagctggcgtctacaagctgacgggagccatcatgcactacgggaacatgaagttcaagcagaagcagcgggaggagcaggcggagccagacggcaccgaagatgctgacaagtcggcctacctcatggggctgaactcagctgacctgctcaaggggctgtgccaccctcgggtgaaagtgggcaacgagtatgtcaccaaggggcagagcgtgcagcaggtgtactactccatcggggctctggccaaggcagtgtatgagaagatgttcaactggatggtgacgcgcatcaacgccaccctggagaccaagcagccacgccagtacttcataggagtcctggacatcgctggcttcgagatcttcgacttcaacagctttgagcagctctgcatcaacttcaccaacgagaagctgcagcagttcttcaaccaccacatgttcgtgctggagcaggaggagtacaagaaggagggcattgagtggacattcattgactttggcatggacctgcaggcctgcattgacctcatcgagaagcccatgggcatcatgtccatcctggaggaggagtgcatgttccccaaggccactgacatgaccttcaaggccaagctgtacgacaaccacctgggcaagtccaacaatttccagaagccacgcaacatcaaggggaagcaggaagcccacttctccctgatccactacgccggcactgtggactacaacatcctgggctggctggaaaaaaacaaggatcctctcaacgagactgttgtggccctgtaccagaagtcctccctcaagctcatggccactctcttctcctcctacgcaactgccgatactggggacagtggtaaaagcaaaggaggcaagaaaaagggctcatccttccagacggtgtcggctctccaccgggaaaatctcaacaagctaatgaccaacctgaggaccacccatcctcactttgtgcgttgcatcatccccaatgagcggaaggctccaggggtgatggacaaccccctggtcatgcaccagctgcgctgcaatggcgtgctggagggcatccgcatctgcaggaagggcttccccaaccgcatcctctacggggacttccggcagaggtatcgcatcctgaacccagtggccatccctgagggacagttcattgatagcaggaaggggacagagaagctgctcagctctctggacattgatcacaaccagtacaagtttggccacaccaaggtgttcttcaaggcagggctgcttgggctgctggaggagatgcgggatgagaggctgagccgcatcatcacgcgcatgcaggcccaagcccggggccagctcatgcgcattgagttcaagaagatagtggaacgcagggatgccctgctggtaatccagtggaacattcgggccttcatgggggtcaagaattggccctggatgaagctctacttcaagatcaagccgctgctgaagagcgcagagacggagaaggagatggccaccatgaaggaagagttcgggcgcatcaaagagacgctggagaagtccgaggctcgccgcaaggagctggaggagaagatggtgtccctgctgcaggagaagaatgacctgcagctccaagtgcaggcggaacaagacaacctcaatgatgctgaggagcgctgcgaccagctgatcaaaaacaagattcagctggaggccaaagtaaaggagatgaatgagaggctggaggatgaggaggagatgaacgcggagctcactgccaagaagcgcaagttggaagacgagtgctcagagctcaagaaggacattgatgacctggagctgacactggccaaggtggagaaggagaagcatgcaacagagaacaaggtgaagaacctaacagaggagatggctgggctggatgaaatcatcgctaagctgaccaaggagaagaaagctctacaagaggcccatcagcaggccctggatgaccttcaggttgaggaagacaaggtcaacagcctgtccaagtctaaggtcaagctggagcagcaggtggatgatctggagggatccctagagcaagagaagaaggtgcgcatggacctggagcgagcaaagcggaaactggagggcgacctgaagctgacccaggagagcatcatggacctggaaaatgataaactgcagctggaagaaaagcttaagaagaaggagtttgacattaatcagcagaacagtaagattgaggatgagcaggcgctggcccttcaactacagaagaaactgaaggaaaaccaggcacgcatcgaggagctggaggaggagctggaggccgagcgcaccgccagggctaaggtggagaagctgcgctcagacctgtctcgggagctggaggagatcagcgagcggctggaagaggccggcggggccacgtccgtgcagatcgagatgaacaagaagcgcgaggccgagttccagaagatgcggcgggacctggaggaggccacgctgcagcacgaggccactgccgcggccctgcgcaagaagcacgccgacagcgtggccgagctgggcgagcagatcgacaacctgcagcgggtgaagcagaagctggagaaggagaagagcgagttcaagctggagctggatgacgtcacctccaacatggagcagatcatcaaggccaaggcaaacctggagaaagtgtctcggacgctggaggaccaggccaatgagtaccgcgtgaagctagaagaggcccaacgctccctcaatgatttcaccacccagcgagccaagctgcagaccgagaatggagagttggcccggcagctagaggaaaaggaggcgctaatctcgcagctgacccgggggaagctctcttatacccagcaaatggaggacctcaaaaggcagctggaggaggagggcaaggcgaagaacgccctggcccatgcactgcagtcagcccggcatgactgcgacctgctgcgggagcagtacgaggaggagacagaggccaaggccgagctgcagcgcgtcctgtccaaggccaactcggaggtggcccagtggaggaccaagtatgagacggacgccattcagcggactgaggagctcgaagaggccaaaaagaagctggcccagcggctgcaggatgccgaggaggccgtggaggctgttaatgccaagtgctcctcactggagaagaccaagcaccggctacagaatgagatagaggacttgatggtggacgtagagcgctccaacgccgctgctgcagccctggacaagaagcagagaaactttgacaagatcctggccgagtggaagcagaagtatgaggagtcgcagtctgagctggagtcctcacagaaggaggctcgctccctcagcacagagctcttcaagctcaagaacgcctacgaggagtccctggagcacctagagaccttcaagcgggagaacaagaaccttcaggaggaaatctcggaccttactgagcagctaggagaaggaggaaagaatgtgcatgagctggagaaggtccgcaaacagctggaggtggagaagctggagctgcagtcagccctggaggaggcagaggcctccctggagcacgaggagggcaagatcctccgggcccagctagagttcaaccagatcaaggcagagatcgagcggaagctggcagagaaggacgaggagatggaacaggccaagcgcaaccaccagcgggtggtggactcgctgcagacctccctggatgcagagacacgcagccgcaacgaggtcctgagggtgaagaagaagatggaaggagacctcaatgagatggagatccagctcagccacgccaaccgcatggccgccgaggcccagaagcaagtcaagagcctccagagcttgctgaaggacacccagatccagctggatgatgcggtccgtgccaacgacgacctgaaggagaacatcgccatcgtggagcggcgcaacaacctgctgcaggctgagctggaggagctgcgtgccgtggtggagcagacagagcggtcccggaagctggcggagcaggagctgattgagaccagcgagcgggtgcagctgctgcattcccagaacaccagcctcatcaaccagaagaagaagatggagtcggatctgacccagctccagtcggaagtggaggaggcagtgcaggagtgcagaaacgccgaggagaaggccaagaaggccatcacggatgccgccatgatggcagaggagctgaagaaggagcaggacaccagcgcccacctggagcgcatgaagaagaacatggagcagaccattaaggacctgcagcaccggctggacgaggccgagcagatcgccctcaagggaggcaagaagcagctgcagaagctggaagcgcgggtgcgggagctggagggtgagctggaggccgagcagaagcgcaacgcagagtcggtgaagggcatgaggaagagcgagcggcgcatcaaggagctcacctaccagacagaggaagacaaaaagaacctgctgcggctacaggacctggtggacaagctgcaactgaaggtcaaggcctacaagcgccaggccgaggaggcggaggagcaagccaacaccaacctgtccaagttccgcaaggtgcagcatgagctggatgaggcagaggagcgggcggacatcgctgagtcccaggtcaacaagcttcgagccaagagccgtgacattggtgccaagcaaaaaatgcacgatgaggagtgacactgcctcgggaacctcactcttgccaacctgtaataaatatgagtgcca

SEQ ID NO: 565 - DNA, 1430 bp, human
aggtgagagaggatgtgtgctgggccttggaggaagggggccgagaccgggccttacttctgtaacgatactgtgaggcatcggaaggccagcctgttgtgtccgttttgaaggatgcccctgtcccgctggttgagatctgtgggggtcttcctgctgccagccccctactgggcaccccgggagaggtggctgggttccctacggcggccctccctggtgcacgggtacccagtcctggcctggcacagtgcccgctgctggtgccaagcgtggacagaggaacctcgagccctttgctcctccctcagaatgaacggagaccagaattcagatgtttatgcccaagaaaagcaggatttcgttcagcacttctcccagatcgttagggtgctgactgaggatgagatggggcacccagagataggagatgctattgcccggctcaaggaggtcctggagtacaatgccattggaggcaagtataaccggggtttgacggtggtagtagcattccgggagctggtggagccaaggaaacaggatgctgatagtctccagcgggcctggactgtgggctggtgtgtggaactgctgcaagctttcttcctggtggcagatgacatcatggattcatcccttacccgccggggacagatctgctggtatcagaagccgggcgtgggtttggatgccatcaatgatgctaacctcctggaagcatgtatctaccgcctgctgaagctctattgccgggagcagccctattacctgaacctgatcgagctcttcctgcagagttcctatcagactgagattgggcagaccctggacctcctcacagccccccagggcaatgtggatcttgtcagattcactgaaaagaggtacaaatctattgtcaagtacaagacagctttctactccttctaccttcctatagctgcagccatgtacatggcaggaattgatggcgagaaggagcacgccaatgccaagaagatcctgctggagatgggggagttctttcagattcaggatgattaccttgacctctttggggaccccagtgtgaccggcaaaattggcactgacatccaggacaacaaatgcagctggctggtggttcagtgtctgcaacgggccactccagaacagtaccagatcctgaaggaaaattacgggcagaaggaggctgagaaagtggcccgggtgaaggcgctatatgaggagctggatctgccagcagtgttcttgcaatatgaggaagacagttacagccacattatggctctcattgaacagtacgcagcacccctgcccccagccgtctttctggggcttgcgcgcaaaatctacaagcggagaaagtgacctagagattgcaagggcggggagaggaggctctcaataaataatcgtgtaacctt

SEQ ID NO: 566 - DNA, 5749 bp, human
ctcccgcttctcctcctcctcctccacagttgcctgccctgggcgggggcgagcgcgtccggtttgctggaagcgttcggaaatggcaacttgcgcggtggaggtgttcgggctcctggaggacgaggaaaattcacgaattgtgagagtaagagttatagccggaataggccttgccaagaaggatatattgggagctagtgatccttacgtgagagtgacgttatatgacccaatgaatggagttcttacaagtgtgcaaacaaaaaccattaaaaagagtttgaatccaaagtggaatgaagaaatattattcagagttcatcctcagcagcaccggcttctttttgaagtgtttgacgaaaaccgattgacaagagatgatttcctaggtcaagtggatgttccactttatccattaccgacagaaaatccaagattggagagaccatatacatttaaggattttgttcttcatccaagaagtcacaaatcaagagttaaaggttatctgagactaaaaatgacttatttacctaaaaccagtggctcagaagatgataatgcagaacaggctgaggaattagagcctggctgggttgttttggaccaaccagatgctgcttgccatttgcagcaacaacaagaaccttctcctctacctccagggtgggaagagaggcaggatatccttggaaggacctattatgtaaaccatgaatctagaagaacacagtggaaaagaccaacccctcaggacaacctaacagatgctgagaatggcaacattcaactgcaagcacaacgtgcatttaccaccaggcggcagatatccgaggaaacagaaagtgttgacaaccaagagtcttccgagaactgggaaattataagagaagatgaagccaccatgtatagcagccaggccttcccatcacctccaccgtcaagtaacttggatgttccaactcatcttgcagaagaattgaatgccagactcaccatttttggaaattcagccgtgagccagccagcatcgagctcaaatcattccagcagaagaggcagcttacaagcctatacttttgaggaacaacctacacttcctgtgcttttgcctacttcatctggattaccaccaggttgggaagaaaaacaagatgaaagaggaagatcatattatgtagatcacaattccagaacgactacttggacaaagcccactgtacaggccacagtggagaccagtcagctgacctcaagccagagttctgcaggccctcaatcacaagcctccaccagtgattcaggccagcaggtgacccagccatctgaaattgagcaaggattccttcctaaaggctgggaagtccggcatgcaccaaatgggaggcctttctttattgaccacaacactaaaaccaccacctgggaagatccaagattgaaaattccagcccatctgagaggaaagacatcacttgatacttccaatgatctagggcctttacctccaggatgggaagagagaactcacacagatggaagaatcttctacataaatcacaatataaaaagaacacaatgggaagatcctcggttggagaatgtagcaataactggaccagcagtgccctactccagggattacaaaagaaagtatgagttcttccgaagaaagttgaagaagcagaatgacattccaaacaaatttgaaatgaaacttcgccgagcaactgttcttgaagactcttaccggagaattatgggtgtcaagagagcagacttcctgaaggctcgactgtggattgagtttgatggtgaaaagggattggattatggaggagttgccagagaatggttcttcctgatctcaaaggaaatgtttaacccttattatgggttgtttgaatattctgctacggacaattataccctacagataaatccaaactctggattgtgtaacgaagatcacctctcttacttcaagtttattggtcgggtagctggaatggcagtttatcatggcaaactgttggatggttttttcatccgcccattttacaagatgatgcttcacaaaccaataacccttcatgatatggaatctgtggatagtgaatattacaattccctaagatggattcttgaaaatgacccaacagaattggacctcaggtttatcatagatgaagaactttttggacagacacatcaacatgagctgaaaaatggtggatcagaaatagttgtcaccaataagaacaaaaaggaatatatttatcttgtaatacaatggcgatttgtaaaccgaatccagaagcaaatggctgcttttaaagagggattctttgaactaataccacaggatctcatcaaaatttttgatgaaaatgaactagagcttcttatgtgtggactgggagatgttgatgtgaatgactggagggaacatacaaagtataaaaatggctacagtgcaaatcatcaggttatacagtggttttggaaggctgttttaatgatggattcagaaaaaagaataagattacttcagtttgtcactggcacatctcgggtgcctatgaatggatttgctgaactatacggttcaaatggaccacagtcatttacagttgaacagtggggtacgcctgaaaagctgccaagagctcatacctgttttaatcgcctggacttgccaccttatgaatcatttgaagaattatgggataaacttcagatggcaattgaaaacacccagggctttgatggagttgattagattacaaataacaatctgtagtgtttttactgccatagttttataaccaaaatcttgacttaaaattttccggggaactactaaaatgtggccactgagtcttcccagatcttgaagaaaatcatataaaaagcatttgaagaaatagtacgacaacttatttttaatcacttttaaataatgtgttgcatttacacagttgtttcatgctgtctttagagttaggtgcctgcctaaagccaggcaccaccacacctggctttagagttcacacaataggatataagtcctgtatgacttaaatagtgaattttatccttaacatttacctcttgtatagtatctgccaggcagttttttcttaaactactgagatgataactgtgaaatatttgtgatacgtgtcatgtgtgaaaagtttgatgcattttgagatggaaaactgaaatttggaaaaagaaatactttactattgagtaaactacaatatatttagtgctactcgcagctatttattattttgtagacctgccttatgcaccttactgcctagatttttgggaaaaaactttggaaagtgtgttacctatatttctagccaactaactcacagaaaaactgtttacttcttcactttcgaagtatttggcttttgttaatatgcagttttactaaacagatggttcataagacatgtgaagcaaattcatatttgcaatgggtaaaaagtattaaagcctttctcttgcctgcatatcctattgaccattggtatagtcatcactttttcatattttagtgtagttagaagaattccttcttcaaacattaaagatccacaaagcagtatttctaaatatgccttgaagaactaaatgaagtgtatagcacttgcctttactagatattctttacacttgtacaattatgtagtaaatgtatgtttacagggtttatcatgtttacagattaagctaatttctgtagtcgcatttttatatttttagtatcactctagtaaaaaaaccaaataatttgtttaaaataaccaaagagttgttataatgcataatttgtattaaatttattactatttcttatgccttttaaaatactgtttactatgaagacaatgtttttaattacaaatccagaattctgtaggcaaaatgctacagttcatatcttcctttaaccaaactgaagtacataaagaccatgtacatgtattcatcaaacgtttattgaatgctgcgtgcctagcgctgtgctatgctctggggtaagagttgtcagcttcagagaagctgagtcctgatcctcaaggaacttgcaaatgtgtctatgaatttgtaaaacaatcaaaagtaggcgtaagcagaataaggcaaaagggaaagtgttctaggttccagcacacctgcaaagataaagtgtgccaagactgtatttatatttcatacttatattgtttcatccttatattggaatgattatatagaaaatgctcttaaaaagattaaacctatttctcagtatggtatcttggtgatttaggaataattgtaaatatatgttacgaatcttcttaaatatatatatatacacaccctgtgagaactgtaaaaagtacctctggttcttggtttaagtttgttggggtataacatgatgagtactcattagcacctgatagaaatctgaaatgtgacagtagcaaaaccactttctactttccaaacaccacagcatcagcatggtttaggggaagcaattcacagattaatgtaccctgcgttttgtcttcaccattgtcaaccagcagtcaaggatgagcaccaggtatagtcctggtttgatatctcaccagccatgtgaactgaagcagcttacttaacctctctggattcatatttcttcatctgtcaaatgagagtaatcatgcccaccctcattgtcatggcagattgtcagaagttccagacagatgagaaagcaaaaagtactttgtaaagtgttatacaatcagaaggtgctttgtgctgaccgtcagattgtgtcaagtcaggtgtgcaaattgaccacactcccaaagaatcatttaaaagtaaagtgacttctaagagacaaggaagtaggaacatttctgatattaaatatataaataatatggatacacatgtgtatatctgtatatggatcttaccatcataattcattttcttcatatcagcaaagtaatagtaatgtgggccaatgcattttggaaatgtcctcattatgtagaatggaatgtgaaaattatttttgttaaaacaggattttgccacaattatttaaatattatgtttgtgaactatctaagcatgagaaaatacaaagctttctttgtatctggctgatactcatttggatgattctgtgactcatagaacatgatgttaaatgagaccagactcaactgccaccagtccccagctgcagaccttcatccccttcatctcccactaggggctcgtggtctggaagaaacatgtatcaagcaacacagccccttatcccagatagaaaagtgtctcaaatgcattctactgcgggacagtcagtaggatcattttcataaagcaaggacatcatatgtttctagaaattacaagcatataactttagcctacaatctcttattaaaaatttttaacaaaattgtattacaaatgcatttcatcagaactcaaatttaaatggtgtttgttttgggtttttatttataatgctgaagttattccatataagtatcaagttaaacacaattcattttgattataaactatttgactttttaaaatcttctgacacagtaaatatatatatcaagattgatgtatcaaaatttattgcacactttaaagtgtaaaatcattttttaaaatcttgaatccacaaataaagttctattctgatttt

SEQ ID NO: 567 - DNA, 2038 bp, human
gcaggcccgttggaagtggttgtgacaaccccagcaatgtggagaagcctggggcttgccctggctctctgtctcctcccatcgggaggaacagagagccaggaccaaagctccttatgtaagcaacccccagcctggagcataagagatcaagatccaatgctaaactccaatggttcagtgactgtggttgctcttcttcaagccagctgatacctgtgcatcatcgaggcatctaaattagaagacctgcgagtaaaactgaagaaagaaggatattctaatatttcttatattgttgttaatcatcaaggaatctcttctcgattaaaatacacacatcttaagaataaggtttcagagcatattcctgtttatcaacaagaagaaaaccaaacagatgtctggactcttttaaatggaagcaaagatgacttcctcatatatgatagatgtggccgtcttgtatatcatcttggtttgcctttttccttcctaactttcccatatgtagaagaagccattaagattgcttactgtgaaaagaaatgtggaaactgctctctcacgactctcaaagatgaagacttttgtaaacgtgtatctttggctactgtggataaaacagttgaaactccatcgcctcattaccatcatgagcatcatcacaatcatggacatcagcaccttggcagcagtgagctttcagagaatcagcaaccaggagcaccaaatgctcctactcatcctgctcctccaggccttcatcaccaccataagcacaagggtcagcataggcagggtcacccagagaaccgagatatgccagcaagtgaagatttacaagatttacaaaagaagctctgtcgaaagagatgtataaatcaattactctgtaaattgcccacagattcagagttggctcctaggagctgatgctgccattgtcgacatctgatatttgaaaaaacagggtctgcaatcacctgacagtgtaaagaaaacctcccatctttatgtagctgacagggacttcgggcagaggagaacataactgaatcttgtcagtgacgtttgcctccagctgcctgacaaataagtcagcagcttatacccacagaagccagtgccagttgacgctgaaagaatcaggcaaaaaagtgagaatgaccttcaaactaaatatttaaaataggacatactccccaatttagtctagacacaatttcatttccagcatttttataaactaccaaattagtgaaccaaaaatagaaattagatttgtgcaaacatggagaaatctactgaattggcttccagattttaaattttatgtcatagaaatattgactcaaaccatattttttatgatggagcaactgaaaggtgattgcagcttttggttaatatgtctttttttttctttttccagtgttctatttgctttaatgagaatagaaacgtaaactatgacctaggggttttctgttggataattagcagtttagaatggaggaagaacaacaaagacatgctttccattttttcctttacttatctctcaaaacaatattactttgtcttttcaatcttctacttttaactaataaaataagtggattttgtattttaagatccagaaatacttaacacgtgaatattttgctaaaaaagcatatataactattttaaatatccatttatcttttgtatatctaagactcatcctgatttttactatcacacatgaataaaggcctttgtatctttctttctctaatgttgtatcatactcttctaaaacttgagtggctgtcttaaaagatataaggggaaagataatattgtctgtctctatattgcttagtaagtatttccatagtcaatgatggtttaataggtaaaccaaaccctataaacctgacctcctttatggttaatactattaagcaagaatgcagtacagaattggatacagtacggatttgtccaaataaattcaataaaaaccttaaaaaaaaaaaaaaaaaaaaaa

SEQ ID NO: 568 - DNA, 1325 bp, human
gcagtagcagcgagcagcagagtccgcacgctccggcgaggggcagaagagcgcgagggagcgcggggcagcagaagcgagagccgagcgcggacccagccaggacccacagccctccccagctgcccaggaagagccccagccatggaacaccagctcctgtgctgcgaagtggaaaccatccgccgcgcgtaccccgatgccaacctcctcaacgaccgggtgctgcgggccatgctgaaggcggaggagacctgcgcgccctcggtgtcctacttcaaatgtgtgcagaaggaggtcctgccgtccatgcggaagatcgtcgccacctggatgctggaggtctgcgaggaacagaagtgcgaggaggaggtcttcccgctggccatgaactacctggaccgcttcctgtcgctggagcccgtgaaaaagagccgcctgcagctgctgggggccacttgcatgttcgtggcctctaagatgaaggagaccatccccctgacggccgagaagctgtgcatctacaccgacggctccatccggcccgaggagctgctgcaaatggagctgctcctggtgaacaagctcaagtggaacctggccgcaatgaccccgcacgatttcattgaacacttcctctccaaaatgccagaggcggaggagaacaaacagatcatccgcaaacacgcgcagaccttcgttgcctcttgtgccacagatgtgaagttcatttccaatccgccctccatggtggcagcggggagcgtggtggccgcagtgcaaggcctgaacctgaggagccccaacaacttcctgtcctactaccgcctcacacgcttcctctccagagtgatcaagtgtgacccagactgcctccgggcctgccaggagcagatcgaagccctgctggagtcaagcctgcgccaggcccagcagaacatggaccccaaggccgccgaggaggaggaagaggaggaggaggaggtggacctggcttgcacacccaccgacgtgcgggacgtggacatctgaggggcccaggcaggcgggcgccaccgccacccgcagcgagggcggagccggccccaggtgctccacatgacagtccctcctctccggagcattttgataccagaagggaaagcttcattctccttgttgttggttgttttttcctttgctctttcccccttccatctctgacttaagcaaaagaaaaagattacccaaaaactgtctttaaaagagagagagagaaaaaaaaaaaaaaaaaaaaaaaaaaaaaaaaaaaaaaaaaaaaaaaaaaaaaaaaaaaaaaaaaaaaa

SEQ ID NO: 569 - DNA, 3026 bp, human
tcgacccacgcgtccggattgaggggttgactgagcgttgcgagccttagctttctcccgaacgccagcgctgaggacacgatgtcgcggctctcccgctcactgctttgggccgccacctgcctgggcgtgctctgcgtgctgtccgcggacaagaacacgacccagcacccgaacgtgacgactttagcgcccatctccaacgtaacctcggcgccggtgacgtccctcccgctggtcaccactccggcaccagaaacctgtgaaggtcgaaacagctgcgtttcctgttttaatgttagcgttgttaatactacctgcttttggatagaatgtaaagatgagagctattgttcacataactcaacagttagtgattgtcaagtggggaacacgacagacttctgttccgtttccacggccactccagtgccaacagccaattctacagctaaacccacagttcagccctccccttctacaacttccaagacagttactacatcaggtacaacaaataacactgtgactccaacctcacaacctgtgcgaaagtctacctttgatgcagccagtttcattggaggaattgtcctggtcttgggtgtgcaggctgtaattttctttctttataaattctgcaaatctaaagaacgaaattaccacactctgtaaacagacccattgaattaataaggactggtgattcatttgtgtaactcactgaagccaaaatactatcttttaagatgtcccacatggaagacgctattccaggatctttaaatttccatggatgcatataggatgtttgggagcatcatccgtgaagaaaaaatcaattaaatcattgtgttcaacaggaatatttaaaatattctgcatgaatcctgtggctgtcttattttaaatagctgctgctgtgggattatattttttttccttaacatgccaaatataactttctgaaagtgatggaaaatgttgtcttgtgcagacaacatcatggctcttggcagtttaaatttagtaattttaatttagtgaacagaattgagaagaacgtgccaaatgagaatcaattaggtggatttttggctgtcatttcaaaagtggaataaatttattaatttagtagtactaaatggtatccttagattaaaattttgtgcttgataacagctgttttttctacattagaaataagatgccacacaaggaactacattccagatttaaagaaatgaaaggataccattagtgtgtataacagattattgttcatacttgtaaagcatcttatgtcattgagaatataaagaacagtgccttagaagacagtgaaaggtaagctctagcttaatgtctatgatttgttctttgacattaaggaaggtaaggattggtcagaggatgtaacttgatgtgagcagtagtaaacctgttttagatatcatactgttaatattttattgaaaatttatttcagagcggagaaacttaagctaaagtctgttatacagaattgaaagccttcgtatcttgaacctcccaacatttttcttatggctgttgaaaagtatagagctaaattgatttaattacactttcctttgtactttaaaaaaaagtatgctagcactattgtaccttgaaaggatttccaccagactgtcttgagtagtgacttctttggtgaggcaagaaggatatacattattttagaatcatttactatttaaatgagacaatcatattattttagaatcatttattttaaatgagacaatcattttaagttttaagataacagaagtgaccaatgtaatttcacaacacctaaggattttttggttgatcaggttactgtagatttttactgattgtcctggatgaatagactgtgctttttctttttctctcccttccttcttggtttcccatagtataataagcatgcatactttaacttctatagttttctcctttagagggtcgtcttcagttttagaggtttacttctcccttgcctttgactcattggactagtgcagaggctttaagtagtttaaaatgggcttttgcttttctaggtcattaacgttttttatttagtttctttagccaatagtggctgagtttcgcacttgattttcaatattttatagtaagaaatgacaaactgctttgtttcatttcataaacaaactctgcatttagataactattaaaggttgttaagatgaagatttactgtttctttgttactcgttggtacagctgtttgttttacttgcacatttgtacatatacttaatgttttcaagtgccttaattgtttaaaatctctggcttcaaagtttcttggggaaaggtcggtttacctcacattttttgtttccattagtaatattctaggtacctcacaaaatgtattatggtgccatggctgttagtttttagtgagtgctgtaggattaattcgaaaataggcagaattccattcctcccaaggtggcaaaaattagctatactgatgtaattgtcatttacctgggtatgaattccctgacacacattcatgtcaacatatgtagcaaattttgtgaaaacataacaatttgaagcttctgtaattttgagcactgctctaacaacaagcataatataaaattagttagattttgcaagtctacaaatgagctcttgcaacagaactcacagcctttttacttttttcccctaactttagcaatgtagtatcttgagccattaatttttgggtttttttaaaatccagaaggtatatagaaaccttttcagatttttcatctgatttgttcttgcagatgttcttctatcaaataccttattttaccttacagatatttgttgcacaggcagatactgctgtatttagacatttctatttcagttcattaaaaactgcaaaaccaatctgtatcatgtaccaaactgacttaaaataaatctacatgtttattgaaaaaaaaaaaaaaaaaaaa

SEQ ID NO: 570 - DNA, 886 bp, human; identical to SEQ ID NO: 493

SEQ ID NO: 571 - DNA, 1279 bp, human
gcggccgcgtcgacatgcagtgtgcctaaaacctgccagcagtacttttgagtttttttttttgttttgttttactttagcatttattattcatggattgaagaaatcaaaatggctgaagataaagagacaaagcatggaggacacaagaatgggaggaaaggcggactctcaggaacttcattcttcacgtggtttatggtgattgcattgctgggcgtctggacatctgtagctgtcgtttggtttgatcttgttgactatgaggaagttctaggaaaactaggaatctatgatgctgatggtgatggagattttgatgtggatgatgccaaagttttattagaaggacccagtggggtagccaagagaaaaactaaggctaaagttaaagaactcactaaagaagagctcaagaaggagaaagagaaacctgagtcaaggaaggaaagtaagaatgaagagagaaaaaaggggaagaaagaggatgtccgaaaggataagaaaattgctgatgcagacctatccaggaaggagtctcctaagggtaaaaaggacagagaaaaagagaaagtggacctagaaaaaagtgctaaaaccaaggaaaataggaaaaaatcaacaaatatgaaggatgtttctagtaaaatggcatcccgagacaaagatgacagaaaggaaagtagaagttctaccagatatgcacacttaacaaagggaaatacccagaaaagaaacggctaaagctctggcatcatcatcccagaacatggtcatgttccagattgcagtttgttacaaaaaagcatggaaaatgtaatattgctctgattggtgagggtgtgtaaattagccattgaatgtatcattggtgcttagcaagtaaattacctgaaatttaaatataccgtctcatacttctaaatgtaaaaacattttaaaaatgtcacagaatatgatgtaataacttctatttattgatcatttattgatcatgtattcagataaatgtatatgtatcatgaatttttatggattaatatattgaatactttcattgacgttaaataagaatattaagattttaaatgttaccctgtgcataatgccttgtaactttttcaagtatgctaaatactcagggagatggatttgctcgttgttttcttccctccttccccttcctgcttccctgttttctctttcgtggacacctccccaggctcatgtgccaccaccttccctcctctccagccctcccagccctcccgcagccttt

SEQ ID NO: 572 - DNA, 2768 bp, human
ccgaggcgctccctgggatcacatggtacctgctccagtgccgcgtgcggcccgggaaccctgggctgctggcgcctgcgcagagccctctgtcccagggaaaggctcgggcaaaaggcggctgagattggcagagtgaaatattactgccgagggaacgtagcagggcacacgtctcgcctctttgcgactcggtgccccgtttctccccatcacctacttacttcctggttgcaacctctcttcctctgggacttttgcaccgggagctccagattcgctaccccgcagcgctgcggagccggcaggcagaggcaccccgtacactgcagagacccgaccctccttgctaccttctagccagaactactgcaggctgattccccctacacactctctctgctcttcccatgcaaagcagaactccgttgcctcaacgtccaacccttctgcagggctgcagtccggccaccccaagaccttgctgcagggtgcttcggatcctgatcgtgagtcgcggggtccactccccgcccttagccagtgcccagggggcaacagcggcgatcgcaacctctagtttgagtcaaggtccagtttgaatgaccgctctcagctggtgaagacatgacgaccctggactccaacaacaacacaggtggcgtcatcacctacattggctccagtggctcctccccaagccgcaccagccctgaatccctctatagtgacaactccaatggcagcttccagtccctgacccaaggctgtcccacctacttcccaccatcccccactggctccctcacccaagacccggctcgctcctttgggagcattccacccagcctgagtgatgacggctccccttcttcctcatcttcctcgtcgtcatcctcctcctccttctataatgggagcccccctgggagtctacaagtggccatggaggacagcagccgagtgtcccccagcaagagcaccagcaacatcaccaagctgaatggcatggtgttactgtgtaaagtgtgtggggacgttgcctcgggcttccactacggtgtgcacgcctgcgagggctgcaagggctttttccgtcggagcatccagcagaacatccagtacaaaaggtgtctgaagaatgagaattgctccatcgtccgcatcaatcgcaaccgctgccagcaatgtcgcttcaagaagtgtctctctgtgggcatgtctcgagacgctgtgcgttttgggcgcatccccaaacgagagaagcagcggatgcttgctgagatgcagagtgccatgaacctggccaacaaccagttgagcagccagtgcccgctggagacttcacccacccagcaccccaccccaggccccatgggcccctcgccaccccctgctccggtcccctcacccctggtgggcttctcccagtttccacaacagctgacgcctcccagatccccaagccctgagcccacagtggaggatgtgatatcccaggtggcccgggcccatcgagagatcttcacctacgcccatgacaagctgggcagctcacctggcaacttcaatgccaaccatgcatcaggtagccctccagccaccaccccacatcgctgggaaaatcagggctgcccacctgcccccaatgacaacaacaccttggctgcccagcgtcataacgaggccctaaatggtctgcgccaggctccctcctcctaccctcccacctggcctcctggccctgcacaccacagctgccaccagtccaacagcaacgggcaccgtctatgccccacccacgtgtatgcagccccagaaggcaaggcacctgccaacagtccccggcagggcaactcaaagaatgttctgctggcatgtcctatgaacatgtacccgcatggacgcagtgggcgaacggtgcaggagatctgggaggatttctccatgagcttcacgcccgctgtgcgggaggtggtagagtttgccaaacacatcccgggcttccgtgacctttctcagcatgaccaagtcaccctgcttaaggctggcacctttgaggtgctgatggtgcgctttgcttcgttgttcaacgtgaaggaccagacagtgatgttcctaagccgcaccacctacagcctgcaggagcttggtgccatgggcatgggagacctgctcagtgccatgttcgacttcagcgagaagctcaactccctggcgcttaccgaggaggagctgggcctcttcaccgcggtggtgcttgtctctgcagaccgctcgggcatggagaattccgcttcggtggagcagctccaggagacgctgctgcgggctcttcgggctctggtgctgaagaaccggcccttggagacttcccgcttcaccaagctgctgctcaagctgccggacctgcggaccctgaacaacatgcattccgagaagctgctgtccttccgggtggacgcccagtgacccgcccggccggccttctgccgctgcccccttgtacagaatcgaactctgcacttctctctcctttacgagacgaaaaggaaaagcaaaccagaatcttatttatattgttataaaatattccaagatgagcctctggccccctgagccttcttgtaaatacctgcctccctcccccatcaccgaacttcccctcctcccctatttaaaccactctgtctcccccacaaccctcccctggccctctgatttgttctgttcctgtctcaaatccaatagttcacagctgagctggg

SEQ ID NO: 573 - DNA, 3279 bp, human
ccggctcgaagcgcaacgaggaagcgtttgcggtgatcccggcgactgcgctggctaatgcggtaccggctagcgtggcttctgcaccccgcactgcccagcaccttccgctcagtcctcggcgcccgcctgccgcctccggagcgcctgtgtggtttccaaaaaaagacttacagcaaaatgaataatccagccatcaagagaataggaaatcacattaccaagtctcctgaagacaagcgagaatatcgagggctagagctggccaatggtatcaaagtacttcttatgagtgatcccaccacggataagtcatcagcagcacttgatgtgcacataggttcattgtcggatcctccaaatattgctggcttaagtcatttttgtgaacatatgctttttttgggaacaaagaaataccctaaagaaaatgaatacagccagtttctcagtgagcatgcaggaagttcaaatgcctttactagtggagagcataccaattactattttgatgtttctcatgaacacctagaaggtgccctagacaggtttgcacagttttttctgtgccccttgttcgatgaaagttgcaaagacagagaggtgaatgcagttgattcagaacatgagaagaatgtgatgaatgatgcctggagactctttcaattggaaaaagctacagggaatcctaaacaccccttcagtaaatttgggacaggtaacaaatatactctggagactagaccaaaccaagaaggcattgatgtaagacaagagctactgaaattccattctgcttactattcatccaacttaatggctgtttgtgttttaggtcgagaatctttagatgacttgactaatctggtggtaaagttattttctgaagtagagaacaaaaatgttccattgccagaatttcctgaacaccctttccaagaagaacatcttaaacaactttacaaaatagtacccattaaagatattaggaatctctatgtgacatttcccatacctgaccttcagaaatactacaaatcaaatcctggtcattatcttggtcatctcattgggcatgaaggtcctggaagtctgttatcagaacttaagtcaaagggctgggttaatactcttgttggtgggcagaaggaaggagcccgaggttttatgttttttatcattaatgtggacttgaccgaggaaggattattacatgttgaagatataattttgcacatgtttcaatacattcagaagttacgtgcagaaggacctcaagaatgggttttccaagagtgcaaggacttgaatgctgttgcttttaggtttaaagacaaagagaggccacggggctatacatctaagattgcaggaatattgcattattatcccctagaagaggtgctcacagcggaatatttactggaagaatttagacctgacttaatagagatggttctcgataaactcagaccagaaaatgtccgggttgccatagtttctaaatcttttgaaggaaaaactgatcgcacagaagagtggtatggaacccagtacaaacaagaagctataccggatgaagtcatcaagaaatggcaaaatgctgacctgaatgggaaatttaaacttcctacaaagaatgaatttattcctacgaattttgagattttaccgttagaaaaagaggcgacaccataccctgctcttattaaggatacagtcatgagcaaactttggttcaaacaagatgataagaaaaaaaagccgaaggcttgtctcaactttgaatttttcagcccatttgcttatgtggaccccttgcactgtaacatggcctatttgtaccttgagctcctcaaagactcactcaacgagtatgcatatgcagcagagctagcaggcttgagctatgatctccaaaataccatctatgggatgtatctttcagtgaaaggttacaatgacaagcagccaattttactaaagaagattattgagaaaatggctacctttgagattgatgaaaaaagatttgaaattatcaaagaagcatatatgcgatctcttaacaatttccgggctgaacagcctcaccagcatgccatgtactacctccgcttgctgatgactgaagtggcctggactaaagatgagttaaaagaagctctggatgatgtaacccttcctcgccttaaggccttcatacctcagctcctgtcacggctgcacattgaagcccttctccatggaaacataacaaagcaggctgcattaggaattatgcagatggttgaagacaccctcattgaacatgctcataccaaacctctccttccaagtcagctggttcggtatagagaagttcagctccctgacagaggatggtttgtttatcagcagagaaatgaagttcacaataactgtggcatcgagatatactaccaaacagacatgcaaagcacctcagagaatatgtttctggagctcttctgtcagattatctcggaaccttgcttcaacaccctgcgcaccaaggagcagttgggctatatcgtcttcagcgggccacgtcgagctaatggcatacagagcttgagattcatcatccagtcagaaaagccacctcactacctagaaagcagagtggaagctttcttaattaccatggaaaagtccatagaggacatgacagaagaggccttccaaaaacacattcaggcattagcaattcgtcgactagacaaaccaaagaagctatctgctgagtgtgctaaatactggggagaaatcatctcccagcaatataattttgacagagataacactgaggttgcatatttaaagacacttaccaaggaagatatcatcaaattctacaaggaaatgttggcagtagatgctccaaggagacataaggtatccgtccatgttcttgccagggaaatggattcttgtcctgttgttggagagttcccatgtcaaaatgacataaatttgtcacaagcaccagccttgccacaacctgaagtgattcagaacatgaccgaattcaagcgtggtctgccactgtttccccttgtgaaaccacatattaacttcatggctgcaaaactctgaagattccccatgcatgggaaagtgcaagtggatgcattcctgagtcttccagagcctaagaaaatcatcttggccactttaatagtttctgattcactattagagaaacaaacaaaaaattgtcaaatgtcattatgtagaaatattataaatccaaagtaa

SEQ ID NO: 574 - DNA, 424 bp, human
accagcccagcctttcagtgcaggctccagccctccacccccacccgagttgcaggatgtcgatgacagacttgctgaacgctgaggacatcaagaaggcggtgggagcctttagcgctaccgactccttcgaccacaaaaagttcttccaaatggtcggcctgaagaaaaagagtgcggatgatgtgaagaaggtgtttcacatgctggacaaggacaaaagtggcttcatcgaggaggatgagctgggattcatcctaaaaggcttctccccagatgccagagacctgtctgctaaagaaaccaagatgctgatggctgctggagacaaagatggggacggcaaaattggggttgacgaattctccactctggtggctgaaagctaagaagcactgactgcccctggtcttccacctctctg

SEQ ID NO: 575 - DNA, 4666 bp, human
cgagactcagccagaggagtacggattaaggggccgaagaaagaggagtgaggcaggggagcgaggcggacgctccgagcgcatcggactcacctgggccggcggcgagcggcgagtacgagtggactcttgccctccgcagcatgcgccccgcctgctaagtcgccgccgtctcgccctcacctagcaccgccaatcccgcctggatggagtcccctctagggttcccattggctcctgtgagtgcttgggtgttcgggagcctgtttttggcggaggggaaccaacttttgaagttcgcccagaagactgcgttccagccccagttccccggcagcgggacccggcgaagacgcgaccgcggcgcgagtcaccatgggaagcaaaggtgtctaccagtaccactggcaaagccacaatgtcaagcacagtggtgtggacgacatggtgctactgtccaagatcacagagaactccatcgtggagaatctgaagaagagatacatggatgactacatttttacatatataggatctgtattaatctcagtcaaccctttcaagcagatgccatattttggggaaaaggaaattgaaatgtaccaaggagcggcacagtatgaaaacccaccacatatctatgcccttgcagataatatgtacagaaacatgatcattgacagagagaaccagtgcgtcattatcagtggtgaaagtggtgctggaaaaacagtggctgccaaatatatcatgagctacatctccagagtgtctggaggagggaccaaagtccagcacgtgaaggacattatcctgcagtccaacccgctgctggaggccttcgggaacgccaagaccgtccggaacaacaactccagccgatttggaaaatactttgaaatccagttcagtccaggtggggaaccagatggtggaaagatctccaacttccttctggaaaaatctagggtggtgatgaggaacccaggagagcggagttttcacatattttaccagctcatcgagggcgcctctgcagagcagaaacacagccttggcatcaccagcatggactattattactacctgagcctctcgggctcatacaaggttgatgacattgacgacaggcgggagtttcaggaaactctgcacgccatgaatgtgattgggatctttgcagaagagcaaacgctggtgttgcagatagtggcgggtattctccacctgggaaacatcagcttcaaagaagttggcaactacgcggctgtggagagtgaagagtttttagcttttcctgcatatctgctagggataaaccaggaccggttgaaagaaaagctaacaagccggcagatggatagcaagtggggaggcaaatccgaatccatccacgtgaccctcaacgtagagcaggcctgttacacccgggatgcgctcgccaaggccctgcacgcccgggtctttgatttcttggtagattccatcaataaagccatggagaaagaccatgaagaatacaacattggcgtcctagacatctatggctttgaaatattccagaaaaatggctttgaacagttttgtatcaattttgttaatgaaaaactgcagcagatttttattgaactgacattaaaggcagaacaggaagaatatgttcaagagggaataagatggacacccattgagtactttaataataaaatcgtatgtgacctcatagagaacaaagtgaaccctcctggcatcatgagcatcctggatgacgtgtgcgccacgatgcatgcggtgggtgagggggcagatcagacgctgctccagaaacttcagatgcagattgggagtcatgagcacttcaacagttggaaccaaggcttcatcattcatcattatgctgggaaggtatcctatgacatggatggcttttgtgaaaggaaccgggatgtgctttttatggatctcatcgagcttatgcagagcagcgagctgcctttcataaagtctttatttccggaaaatctgcaggctgacaagaaagggcgcccaactactgccggaagcaaaataaagaaacaagccaatgaccttgtgagcaccctgatgaaatgtacgccccactacattcgctgcatcaagccaaacgaaaccaagaagcccagagactgggaggaaagcagggtaaagcatcaagtcgaatatttgggtctgaaagagaacattcgagtgagaagagctggctatgcctatcggcgcatcttccaaaaattcctacagaggtatgccattctgaccaaagccacctggccttcttggcagggagaggagaagcaaggcgtcctgcacctgctgcagtcggtcaacatggacagcgaccagttccagctggggaggagtaaagtgttcatcaaagcccccgagtctctatttcttttagaagagatgagagagagaaagtatgatgggtatgctcgagtgatacagaaatcatggaggaaattcgtggcccggaagaaatacgttcaaatgagagaagaagcctcagacctcttattgaacaagaaggagagaaggagaaacagtattaacaggaactttataggggattatattgggatggaagagcacccagaactccagcagttcgtgggcaagagggagaagattgatttcgcagacacagtcaccaagtatgacaggaggttcaagggtgtaaagcgagacctgctccttaccccaaagtgcttgtacttaatcggacgagaaaaagtcaaacagggcccagacaagggcctggtgaaagaagtcctgaagcggaaaatcgagatagaacggatcttgtctgtgtccctcagtactatgcaggatgacatttttattctccatgagcaagagtatgacagtttgcttgaatctgtcttcaaaactgaattcctaagcctcttagcaaagcgttacgaggagaagacccagaagcaactacctctgaaattcagcaatacgcttgaactgaagttgaaaaaggaaaactggggccctggagtgcagggtgcgggctcccggcaagtgcagttccaccaagggtttggggacctggctgtcctcaagcccagtaacaaagtgctgcaggtcagcatcggacctggactgcccaagaactcccgtcctaccagaaggaacactacccaaaatacaggttattccagtgggactcaaaatgccaactacccagtgagagctgcccctcctcccccaggataccatcagaacggagtcatcagaaaccagtatgtgccatatccccatgctcctggaagccagaggtccattcagaaaagcctgtacacctccatggcccgcccgcccttgcctcggcagcagtctaccagttcagaccgagtgtcacagacgccagagagcctggatttcctcaaggtcccggaccagggagctgcaggggtcaggagacaaacaaccagtcggcctcccccagctgggggcagacccaagccccagcccaagcccaagcctcaggttccacagtgcaaggctttgtatgcctatgacgctcaggacacagacgaactcagctttaatgccaatgacattattgatattatcaaagaagatccttctggctggtggacgggtcgactacgaggcaagccagggctgttccccaacaactatgtgaccaagatctgaggtgcccgtgactctgacacatggggcagaggagctccaggcacagaccaggtgaggggatatttaggtgctccccttacaatccacaatgagcaattgcttctccaaggcctggagctattctggtaccttccccatggaggacactgaaaaggctgggttggggacagggagtatcactccataagtgatcctaaaaggtagcctcttcataggaaccaggaggacaaaaccaccatgcattaagatttatttattgtatttaaacctggtgagaggacaagtgaggtctgctcagaccttgtaggcttctatcaaaacagcaccctgcttgctcaccaggcctagagaatggctgtaggtggcggctgagaagtgcctttagttgaagagcacatttctttcatctctcttgtctatacctgatagacacattcctctctgccaccttccttcagggaggacccgccctctgcagactgggcttagcgtgagcaggcacttcccatgtacgtgccaagggtaagctggcctgctgagcccagggcgacagaggggcactggtttacactttgccgggaccatcagggccgccaagcaggtcaggggctgggggctggtcctgctggctttgatttctctgggtcttcaattagaatgtggctgggcccatattggtttgtgttaaatgctgtacttactacaagaatcttttttcaagcatgtacatttataaaaacaggatcatatactgtatatataaaaatcttgagatggtagaaacatgtatgaatgtactaagtagtattccactgtactcattcataaggtaggttttcttacaaaactcacaccaggtacttaaagatgtgctctgcttttttccaactacggagtgtcactgctttctaggtcagtccctgcagactcttctcaactctttccctataggaaacttact

SEQ ID NO: 576 - DNA, 1722 bp, human
ggggaaaagagctaggaaagagctgcaaagcagtgtgggctttttccctttttttgctccttttcattacccctcctccgttttcacccttctccggacttcgcgtagaacctgcgaatttcgaagaggaggtggcaaagtgggagaaaagaggtgttagggtttggggtttttttgtttttgtttttgttttttaatttcttgatttcaacattttctcccaccctctcggctgcagccaacgcctcttacctgttctgcggcgccgcgcaccgctggcagctgagggttagaaagcggggtgtattttagattttaagcaaaaattttaaagataaatccatttttctctcccacccccaacgccatctccactgcatccgatctcattatttcggtggttgcttgggggtgaacaattttgtggctttttttcccctataattctgacccgctcaggcttgagggtttctccggcctccgctcactgcgtgcacctggcgctgccctgcttcccccaacctgttgcaaggctttaattcttgcaactgggacctgctcgcaggcaccccagccctccacctctctctacatttttgcaagtgtctgggggagggcacctgctctacctgccagaaattttaaaacaaaaacaaaaacaaaaaaatctccgggggccctcttggcccctttatccctgcactctcgctctcctgccccaccccgaggtaaagggggcgactaagagaagatggtgttgctcaccgcggtcctcctgctgctggccgcctatgcggggccggcccagagcctgggctccttcgtgcactgcgagccctgcgacgagaaagccctctccatgtgcccccccagccccctgggctgcgagctggtcaaggagccgggctgcggctgctgcatgacctgcgccctggccgaggggcagtcgtgcggcgtctacaccgagcgctgcgcccaggggctgcgctgcctcccccggcaggacgaggagaagccgctgcacgccctgctgcacggccgcggggtttgcctcaacgaaaagagctaccgcgagcaagtcaagatcgagagagactcccgtgagcacgaggagcccaccacctctgagatggccgaggagacctactcccccaagatcttccggcccaaacacacccgcatctccgagctgaaggctgaagcagtgaagaaggaccgcagaaagaagctgacccagtccaagtttgtcgggggagccgagaacactgcccacccccggatcatctctgcacctgagatgagacaggagtctgagcagggcccctgccgcagacacatggaggcttccctgcaggagctcaaagccagcccacgcatggtgccccgtgctgtgtacctgcccaattgtgaccgcaaaggattctacaagagaaagcagtgcaaaccttcccgtggccgcaagcgtggcatctgctggtgcgtggacaagtacgggatgaagctgccaggcatggagtacgttgacggggactttcagtgccacaccttcgacagcagcaacgttgagtgatgcgtccccccccaacctttccctcaccccctcccacccccagccccgactccagccagcgcctccctccaccccaggacgccactcatttcatctcatttaagggaaaaatatatatctatctatttgaggaaaaaaaaaaaaaaaaaaaa

SEQ ID NO: 577 - DNA, 1578 bp, human
gatcagggccgagttgtctcggcggcgctgccgaggcctccacccaggacagtccccctccccgggcctctctcctcttgcctacgagtcccctctcctcgtaggcctctcggatctgatatcgtggggtgaggtgagcaggcccggggagggtggttaccgctgaggagctgcagtctctgtcaagatgatagaggtactgacaacaactgactctcagaaactgctacaccagctgaatgccctgttggaacaggagtctagatgtcagccaaaggtctgtggtttgagactaattgagtctgcacacgataatggcctcagaatgactgcaagactaagggactttgaagtaaaagatcttcttagtctaactcagttctttggctttgacacagagacattttctctagctgtgaatttactggacagattcctgtctaaaatgaaggtacagcccaagcaccttgggtgtgttggactgagctgcttttatttggctgtaaaatcaatagaagaggaaaggaatgtcccattggcaactgacttgatccgaataagtcaatataggtttacggtttcagacttgatgagaatggaaaagattgtattggagaaggtgtgttggaaagtcaaagctactactgcctttcaatttctgcaactgtattattcactccttcaagagaacttgccacttgaaaggagaaatagcattaattttgaaagactagaagctcaactgaaggcatgtcattgcaggatcatattttctaaagcaaagccttctgtgttggcattgtctatcattgcattagagatccaagcacagaagtgtgtagagttaacagaaggaatagaatgtcttcagaaacattccaagataaatggcagagatctgaccttctggcaagagcttgtatccaaatgtttaactgaatattcatcaaataagtgttccaaaccaaatgttcagaagttgaaatggattgtttctgggcgtactgcacggcaattgaagcatagctactacagaataactcaccttccaacaattcctgaaatggtcccttaactggattattacagcaccaaaaaacttctctgaagcctttctccacaaccttgttctatggattccataatgttacaatggatttaagctatgaagcctcaaaacatcacgagataagcatgatggtctcagacttgggaaaactgcctaatattatgctgtagtggaattatgtttatgatttgaattcatctgtgaaggcattcaaatcaaagctaaaagcctaaatgtgaaatgctaatgacaagcctgagaaggtaaactatgaatcttcatttctatcattgatctaactttagatattggatcaatatatttaggtggtattgaaaatgctattggaggagtcacactaatactatcaactatcagtcttcccacagcttcaatcactgtcattattctaatcctactcctacttaaattttaagttatgaggtttatgtcgaaagcaacatttcacaaatgtacttttaaggcataataagggttaacattctagg

SEQ ID NO: 578 - DNA, 1751 bp, human
tttaactgtgctatggagtagaagcaggaggttttcaacctagtcacagagcagcacctaccccctcctcctttccacacctgcaaactcttttacttgggctgaatatttagtgtaattacatctcagctttgagggctcctgtggcaaattcccggattaaaaggttccctggttgtgaaaatacatgagataaatcatgaaggccactatcatcctccttctgcttgcacaagtttcctgggctggaccgtttcaacagagaggcttatttgactttatgctagaagatgaggcttctgggataggcccagaagttcctgatgaccgcgacttcgagccctccctaggcccagtgtgccccttccgctgtcaatgccatcttcgagtggtccagtgttctgatttgggtctggacaaagtgccaaaggatcttccccctgacacaactctgctagacctgcaaaacaacaaaataaccgaaatcaaagatggagactttaagaacctgaagaaccttcacgcattgattcttgtcaacaataaaattagcaaagttagtcctggagcatttacacctttggtgaagttggaacgactttatctgtccaagaatcagctgaaggaattgccagaaaaaatgcccaaaactcttcaggagctgcgtgcccatgagaatgagatcaccaaagtgcgaaaagttactttcaatggactgaaccagatgattgtcatagaactgggcaccaatccgctgaagagctcaggaattgaaaatggggctttccagggaatgaagaagctctcctacatccgcattgctgataccaatatcaccagcattcctcaaggtcttcctccttcccttacggaattacatcttgatggcaacaaaatcagcagagttgatgcagctagcctgaaaggactgaataatttggctaagttgggattgagtttcaacagcatctctgctgttgacaatggctctctggccaacacgcctcatctgagggagcttcacttggacaacaacaagcttaccagagtacctggtgggctggcagagcataagtacatccaggttgtctaccttcataacaacaatatctctgtagttggatcaagtgacttctgcccacctggacacaacaccaaaaaggcttcttattcgggtgtgagtcttttcagcaacccggtccagtactgggagatacagccatccaccttcagatgtgtctacgtgcgctctgccattcaactcggaaactataagtaattctcaagaaagccctcatttttataacctggcaaaatcttgttaatgtcattgctaaaaaataaataaaagctagatactggaaacctaactgcaatgtggatgttttacccacatgacttattatgcataaagccaaatttccagtttaagtaattgcctacaataaaaagaaattttgcctgccattttcagaatcatcttttgaagctttctgttgatgttaactgagctactagagatattcttatttcactaaatgtaaaatttggagtaaatatatatgtcaatatttagtaaagcttttcttttttaatttccaggaaaaaataaaaagagtatgagtcttctgtaattcattgagcagttagctcatttgagataaagtcaaatgccaaacactagctctgtattaatccccatcattactggtaaagcctcatttgaatgtgtgaattcaatacaggctatg

SEQ ID NO: 579 - DNA, 1578 bp, human; identical to SEQ ID NO: 577

SEQ ID NO: 580 - DNA, 1963 bp, human
gaaacgtcccgtgtgggaggggcgggtctgggtgcggctgccgcatgactcgtggttcggaggcccacgtggccggggcggggactcaggcgcctggcagccgactgattacgtagcgggcggggccggaagtgccgctccttggtgggggctgttcatggcggttccggggtctccaacatttttcccggtctgtggtcctaaatctgtccaaagcagaggcagtggagcttgaggttcttgctggtgtgaaatgactgagtacaaactggtggtggttggagcaggtggtgttgggaaaagcgcactgacaatccagctaatccagaaccactttgtagatgaatatgatcccaccatagaggattcttacagaaaacaagtggttatagatggtgaaacctgtttgttggacatactggatacagctggacaagaagagtacagtgccatgagagaccaatacatgaggacaggcgaaggcttcctctgtgtatttgccatcaataatagcaagtcatttgcggatattaacctctacagggagcagattaagcgagtaaaagactcggatgatgtacctatggtgctagtgggaaacaagtgtgatttgccaacaaggacagttgatacaaaacaagcccacgaactggccaagagttacgggattccattcattgaaacctcagccaagaccagacagggtgttgaagatgctttttacacactggtaagagaaatacgccagtaccgaatgaaaaaactcaacagcagtgatgatgggactcagggttgtatgggattgccatgtgtggtgatgtaacaagatacttttaaagttttgtcagaaaagagccactttcaagctgcactgacaccctggtcctgacttcctggaggagaagtattcctgttgctgtcttcagtctcacagagaagctcctgctacttccccagctctcagtagtttagtacaataatctctatttgagaagttctcagaataactacctcctcacttggctgtctgaccagagaatgcacctcttgttactccctgttatttttctgccctgggttcttccacagcacaaacacacctcaacacacctctgccaccccaggtttttcatctgaaaagcagttcatgtctgaaacagagaaccaaaccgcaaacgtgaaattctattgaaaacagtgtcttgagctctaaagtagcaactgctggtgattttttttttctttttactgttgaacttagaactatgcctaatttttggagaaatgtcataaattactgttttgccaagaatatagttattattgctgtttggtttgtttataatgttatcggctctattctctaaactggcatctgctctagattcataaatacaaaaatgaatactgaattttgagtctatcctagtcttcacaactttgacgtaattaaatccaacttttcacagtgaagtgcctttttcctagaagtggtttgtagactcctttataatatttcagtggaatagatgtctcaaaaatccttatgcatgaaatgaatgtctgagatacgtctgtgacttatctaccattgaaggaaagctatatctatttgagagcagatgccattttgtacatgtatgaaattggttttccagaggcctgttttggggctttcccaggagaaagatgaaactgaaagcatatgaataatttcacttaataatttttacctaatctccacttttttcataggttactacctatacaatgtatgtaatttgtttcccctagcttactgataaacctaatattcaatgaacttccatttgtattcaaatttgtgtcataccagaaagctctacatttgcagatgttcaaatattgtaaaactttggtgcattgttatttaatagctgtgatcagtgattttcaaacctcaaatatagtatattaacaaatt

SEQ ID NO: 581 - DNA, 1883 bp, human
gtcccagtcagtccggaggctgcggctgcagaagtaccgctgcggagtaactgcaaagatgctgtccgtgcgcgttgctgcggccgtggtccgcgcccttcctcggcgggccggactggtctccagaaatgctttgggttcatctttcattgctgcaaggaacttccatgcctctaacactcatcttcaaaagactgggactgctgagatgtcctctattcttgaagagcgtattcttggagctgatacctctgttgatcttgaagaaactgggcgtgtcttaagtattggtgatggtattgcccgcgtacatgggctgaggaatgttcaagcagaagaaatggtagagttttcttcaggcttaaagggtatgtccttgaacttggaacctgacaatgttggtgttgtcgtgtttggaaatgataaactaattaaggaaggagatatagtgaagaggacaggagccattgtggacgttccagttggtgaggagctgttgggtcgtgtagttgatgcccttggtaatgctattgatggaaagggtccaattggttccaagacgcgtaggcgagttggtctgaaagcccccggtatcattcctcgaatttcagtgcgggaaccaatgcagactggcattaaggctgtggatagcttggtgccaattggtcgtggtcagcgtgaactgattattggtgaccgacagactgggaaaacctcaattgctattgacacaatcattaaccagaaacgtttcaatgatggatctgatgaaaagaagaagctgtactgtatttatgttgctattggtcaaaagagatccactgttgcccagttggtgaagagacttacagatgcagatgccatgaagtacaccattgtggtgtcggctacggcctcggatgctgccccacttcagtacctggctccttactctggctgttccatgggagagtattttagagacaatggcaaacatgctttgatcatctatgacgacttatccaaacaggctgttgcttaccgtcagatgtctctgttgctccgccgaccccctggtcgtgaggcctatcctggtgatgtgttctacctacactcccggttgctggagagagcagccaaaatgaacgatgcttttggtggtggctccttgactgctttgccagtcatagaaacacaggctggtgatgtgtctgcttacattccaacaaatgtcatttccatcactgacggacagatcttcttggaaacagaattgttctacaaaggtatccgccctgcaattaacgttggtctgtctgtatctcgtgtcggatccgctgcccaaaccagggctatgaagcaggtagcaggtaccatgaagctggaattggctcagtatcgtgaggttgctgcttttgcccagttcggttctgacctcgatgctgccactcaacaacttttgagtcgtggcgtgcgtctaactgagttgctgaagcaaggacagtattctcccatggctattgaagaacaagtggctgttatctatgcgggtgtaaggggatatcttgataaactggagcccagcaagattacaaagtttgagaatgctttcttgtctcatgtcgtcagccagcaccaagccttgttgggcactatcagggctgatggaaagatctcagaacaatcagatgcaaagctgaaagagattgtaacaaatttcttggctggatttgaagcttaaactcctgtggattcacatcaaataccagttcagttttgtcattgttctagtaaattagttccatttgtaaaagggttactctcatactccttatgtacagaaatcacatgaaaaataaaggttccataatgcaaaaaaaaaaaaaaaaaaaaaaaaaaaaaaa

SEQ ID NO: 582 - DNA, 691 bp, human; identical to SEQ ID NO: 562

SEQ ID NO: 583 - DNA, 4752 bp, human
agacgggagtttctcctcggggtcggagcaggaggcacgcggagtgtgaggccacgcatgagcggacgctaaccccctccccagccacaaagagtctacatgtctagggtctagacatgttcagctttgtggacctccggctcctgctcctcttagcggccaccgccctcctgacgcacggccaagaggaaggccaagtcgagggccaagacgaagacatcccaccaatcacctgcgtacagaacggcctcaggtaccatgaccgagacgtgtggaaacccgagccctgccggatctgcgtctgcgacaacggcaaggtgttgtgcgatgacgtgatctgtgacgagaccaagaactgccccggcgccgaagtccccgagggcgagtgctgtcccgtctgccccgacggctcagagtcacccaccgaccaagaaaccaccggcgtcgagggacccaagggagacactggcccccgaggcccaaggggacccgcaggcccccctggccgagatggcatccctggacagcctggacttcccggaccccccggaccccccggacctcccggaccccctggcctcggaggaaactttgctccccagctgtcttatggctatgatgagaaatcaaccggaggaatttccgtgcctggccccatgggtccctctggtcctcgtggtctccctggcccccctggtgcacctggtccccaaggcttccaaggtccccctggtgagcctggcgagcctggagcttcaggtcccatgggtccccgaggtcccccaggtccccctggaaagaatggagatgatggggaagctggaaaacctggtcgtcctggtgagcgtgggcctcctgggcctcagggtgctcgaggattgcccggaacagctggcctccctggaatgaagggacacagaggtttcagtggtttggatggtgccaagggagatgctggtcctgctggtcctaagggtgagcctggcagccctggtgaaaatggagctcctggtcagatgggcccccgtggcctgcctggtgagagaggtcgccctggagcccctggccctgctggtgctcgtggaaatgatggtgctactggtgctgccgggccccctggtcccaccggccccgctggtcctcctggcttccctggtgctgttggtgctaagggtgaagctggtccccaagggccccgaggctctgaaggtccccagggtgtgcgtggtgagcctggcccccctggccctgctggtgctgctggccctgctggaaaccctggtgctgatggacagcctggtgctaaaggtgccaatggtgctcctggtattgctggtgctcctggcttccctggtgcccgaggcccctctggaccccagggccccggcggccctcctggtcccaagggtaacagcggtgaacctggtgctcctggcagcaaaggagacactggtgctaagggagagcctggccctgttggtgttcaaggaccccctggccctgctggagaggaaggaaagcgaggagctcgaggtgaacccggacccactggcctgcccggaccccctggcgagcgtggtggacctggtagccgtggtttccctggcgcagatggtgttgctggtcccaagggtcccgctggtgaacgtggttctcctggccctgctggccccaaaggatctcctggtgaagctggtcgtcccggtgaagctggtctgcctggtgccaagggtctgactggaagccctggcagccctggtcctgatggcaaaactggcccccctggtcccgccggtcaagatggtcgccccggacccccaggcccacctggtgcccgtggtcaggctggtgtgatgggattccctggacctaaaggtgctgctggagagcccggcaaggctggagagcgaggtgttcccggaccccctggcgctgtcggtcctgctggcaaagatggagaggctggagctcagggaccccctggccctgctggtcccgctggcgagagaggtgaacaaggccctgctggctcccccggattccagggtctccctggtcctgctggtcctccaggtgaagcaggcaaacctggtgaacagggtgttcctggagaccttggcgcccctggcccctctggagcaagaggcgagagaggtttccctggcgagcgtggtgtgcaaggtccccctggtcctgctggtccccgaggggccaacggtgctcccggcaacgatggtgctaagggtgatgctggtgcccctggagctcccggtagccagggcgcccctggccttcagggaatgcctggtgaacgtggtgcagctggtcttccagggcctaagggtgacagaggtgatgctggtcccaaaggtgctgatggctctcctggcaaagatggcgtccgtggtctgaccggccccattggtcctcctggccctgctggtgcccctggtgacaagggtgaaagtggtcccagcggccctgctggtcccactggagctcgtggtgcccccggagaccgtggtgagcctggtccccccggccctgctggctttgctggcccccctggtgctgacggccaacctggtgctaaaggcgaacctggtgatgctggtgctaaaggcgatgctggtccccctggccctgccggacccgctggaccccctggccccattggtaatgttggtgctcctggagccaaaggtgctcgcggcagcgctggtccccctggtgctactggtttccctggtgctgctggccgagtcggtcctcctggcccctctggaaatgctggaccccctggccctcctggtcctgctggcaaagaaggcggcaaaggtccccgtggtgagactggccctgctggacgtcctggtgaagttggtccccctggtccccctggccctgctggcgagaaaggatcccctggtgctgatggtcctgctggtgctcctggtactcccgggcctcaaggtattgctggacagcgtggtgtggtcggcctgcctggtcagagaggagagagaggcttccctggtcttcctggcccctctggtgaacctggcaaacaaggtccctctggagcaagtggtgaacgtggtccccctggtcccatgggcccccctggattggctggaccccctggtgaatctggacgtgagggggctcctggtgccgaaggttcccctggacgagacggttctcctggcgccaagggtgaccgtggtgagaccggccccgctggaccccctggtgctcctggtgctcctggtgcccctggccccgttggccctgctggcaagagtggtgatcgtggtgagactggtcctgctggtcccgccggtcctgtcggccctgttggcgcccgtggccccgccggaccccaaggcccacgtggtgacaagggtgagacaggcgaacagggcgacagaggcataaagggtcaccgtggcttctctggcctccagggtccccctggccctcctggctctcctggtgaacaaggtccctctggagcctctggtcctgctggtccccgaggtccccctggctctgctggtgctcctggcaaagatggactcaacggtctccctggccccattgggccccctggtcctcgcggtcgcactggtgatgctggtcctgttggtccccccggccctcctggacctcctggtccccctggtcctcccagcgctggtttcgacttcagcttcctgccccagccacctcaagagaaggctcacgatggtggccgctactaccgggctgatgatgccaatgtggttcgtgaccgtgacctcgaggtggacaccaccctcaagagcctgagccagcagatcgagaacatccggagcccagagggcagccgcaagaaccccgcccgcacctgccgtgacctcaagatgtgccactctgactggaagagtggagagtactggattgaccccaaccaaggctgcaacctggatgccatcaaagtcttctgcaacatggagactggtgagacctgcgtgtaccccactcagcccagtgtggcccagaagaactggtacatcagcaagaaccccaaggacaagaggcatgtctggttcggcgagagcatgaccgatggattccagttcgagtatggcggccagggctccgaccctgccgatgtggccatccagctgaccttcctgcgcctgatgtccaccgaggcctcccagaacatcacctaccactgcaagaacagcgtggcctacatggaccagcagactggcaacctcaagaaggccctgctcctccagggctccaacgagatcgagatccgcgccgagggcaacagccgcttcacctacagcgtcactgtcgatggctgcacgagtcacaccggagcctggggcaagacagtgattgaatacaaaaccaccaagacctcccgcctgcgcatcatcgatgtggcccccttggacgttggtgccccagaccaggaattcggcttcgacgttggccatgtctgcttcctgtaaactccctccatcccaacctggctccctcccacccaaccaactttccccccaacccggaaacagacaagcaacccaaactgaaccccctcaaaagccaaaaaatgggagacaatttcacatggactttggaaaatatttttttcctttgcattcatctctcaaacttagtttttatctttgaccaaccgaacatgaccaaaaaccaaaagtgcattcaaccttaccaaaaaaaaaaaaaaaa

SEQ ID NO: 584 - DNA, 5489 bp, human
ggctgagttttatgacgggcccggtgctgaagggcagggaacaacttgatggtgctactttgaactgcttttcttttctcctttttgcacaaagagtctcatgtctgatatttagacatgatgagctttgtgcaaaaggggagctggctacttctcgctctgcttcatcccactattattttggcacaacaggaagctgttgaaggaggatgttcccatcttggtcagtcctatgcggatagagatgtctggaagccagaaccatgccaaatatgtgtctgtgactcaggatccgttctctgcgatgacataatatgtgacgatcaagaattagactgccccaacccagaaattccatttggagaatgttgtgcagtttgcccacagcctccaactgctcctactcgccctcctaatggtcaaggacctcaaggccccaagggagatccaggccctcctggtattcctgggagaaatggtgaccctggtattccaggacaaccagggtcccctggttctcctggcccccctggaatctgtgaatcatgccctactggtcctcagaactattctccccagtatgattcatatgatgtcaagtctggagtagcagtaggaggactcgcaggctatcctggaccagctggccccccaggccctcccggtccccctggtacatctggtcatcctggttcccctggatctccaggataccaaggaccccctggtgaacctgggcaagctggtccttcaggccctccaggacctcctggtgctataggtccatctggtcctgctggaaaagatggagaatcaggtagacccggacgacctggagagcgaggattgcctggacctccaggtatcaaaggtccagctgggatacctggattccctggtatgaaaggacacagaggcttcgatggacgaaatggagaaaagggtgaaacaggtgctcctggattaaagggtgaaaatggtcttccaggcgaaaatggagctcctggacccatgggtccaagaggggctcctggtgagcgaggacggccaggacttcctggggctgcaggtgctcggggtaatgacggtgctcgaggcagtgatggtcaaccaggccctcctggtcctcctggaactgccggattccctggatcccctggtgctaagggtgaagttggacctgcagggtctcctggttcaaatggtgcccctggacaaagaggagaacctggacctcagggacacgctggtgctcaaggtcctcctggccctcctgggattaatggtagtcctggtggtaaaggcgaaatgggtcccgctggcattcctggagctcctggactgatgggagcccggggtcctccaggaccagccggtgctaatggtgctcctggactgcgaggtggtgcaggtgagcctggtaagaatggtgccaaaggagagcccggaccacgtggtgaacgcggtgaggctggtattccaggtgttccaggagctaaaggcgaagatggcaaggatggatcacctggagaacctggtgcaaatgggcttccaggagctgcaggagaaaggggtgcccctgggttccgaggacctgctggaccaaatggcatcccaggagaaaagggtcctgctggagagcgtggtgctccaggccctgcagggcccagaggagctgctggagaacctggcagagatggcgtccctggaggtccaggaatgaggggcatgcccggaagtccaggaggaccaggaagtgatgggaaaccagggcctcccggaagtcaaggagaaagtggtcgaccaggtcctcctgggccatctggtccccgaggtcagcctggtgtcatgggcttccccggtcctaaaggaaatgatggtgctcctggtaagaatggagaacgaggtggccctggaggacctggccctcagggtcctcctggaaagaatggtgaaactggacctcaaggacccccagggcctactgggcctggtggtgacaaaggagacacaggaccccctggtccacaaggattacaaggcttgcctggtacaggtggtcctccaggagaaaatggaaaacctggggaaccaggtccaaagggtgatgccggtgcacctggagctccaggaggcaagggtgatgctggtgcccctggtgaacgtggacctcctggattggcaggggccccaggacttagaggtggagctggtccccctggtcccgaaggaggaaagggtgctgctggtcctcctgggccacctggtgctgctggtactcctggtctgcaaggaatgcctggagaaagaggaggtcttggaagtcctggtccaaagggtgacaagggtgaaccaggcggcccaggtgctgatggtgtcccagggaaagatggcccaaggggtcctactggtcctattggtcctcctggcccagctggccagcctggagataagggtgaaggtggtgcccccggacttccaggtatagctggacctcgtggtagccctggtgagagaggtgaaactggccctccaggacctgctggtttccctggtgctcctggacagaatggtgaacctggtggtaaaggagaaagaggggctccgggtgagaaaggtgaaggaggccctcctggagttgcaggaccccctggaggttctggacctgctggtcctcctggtccccaaggtgtcaaaggtgaacgtggcagtcctggtggacctggtgctgctggcttccctggtgctcgtggtcttcctggtcctcctggtagtaatggtaacccaggacccccaggtcccagcggttctccaggcaaggatgggcccccaggtcctgcgggtaacactggtgctcctggcagccctggagtgtctggaccaaaaggtgatgctggccaaccaggagagaagggatcgcctggtgcccagggcccaccaggagctccaggcccacttgggattgctgggatcactggagcacggggtcttgcaggaccaccaggcatgccaggtcctaggggaagccctggccctcagggtgtcaagggtgaaagtgggaaaccaggagctaacggtctcagtggagaacgtggtccccctggaccccagggtcttcctggtctggctggtacagctggtgaacctggaagagatggaaaccctggatcagatggtcttccaggccgagatggatctcctggtggcaagggtgatcgtggtgaaaatggctctcctggtgcccctggcgctcctggtcatccaggcccacctggtcctgtcggtccagctggaaagagtggtgacagaggagaaagtggccctgctggccctgctggtgctcccggtcctgctggttcccgaggtgctcctggtcctcaaggcccacgtggtgacaaaggtgaaacaggtgaacgtggagctgctggcatcaaaggacatcgaggattccctggtaatccaggtgccccaggttctccaggccctgctggtcagcagggtgcaatcggcagtccaggacctgcaggccccagaggacctgttggacccagtggacctcctggcaaagatggaaccagtggacatccaggtcccattggaccaccagggcctcgaggtaacagaggtgaaagaggatctgagggctccccaggccacccagggcaaccaggccctcctggacctcctggtgcccctggtccttgctgtggtggtgttggagccgctgccattgctgggattggaggtgaaaaagctggcggttttgccccgtattatggagatgaaccaatggatttcaaaatcaacaccgatgagattatgacttcactcaagtctgttaatggacaaatagaaagcctcattagtcctgatggttctcgtaaaaaccccgctagaaactgcagagacctgaaattctgccatcctgaactcaagagtggagaatactgggttgaccctaaccaaggatgcaaattggatgctatcaaggtattctgtaatatggaaactggggaaacatgcataagtgccaatcctttgaatgttccacggaaacactggtggacagattctagtgctgagaagaaacacgtttggtttggagagtccatggatggtggttttcagtttagctacggcaatcctgaacttcctgaagatgtccttgatgtgcagctggcattccttcgacttctctccagccgagcttcccagaacatcacatatcactgcaaaaatagcattgcatacatggatcaggccagtggaaatgtaaagaaggccctgaagctgatggggtcaaatgaaggtgaattcaaggctgaaggaaatagcaaattcacctacacagttctggaggatggttgcacgaaacacactggggaatggagcaaaacagtctttgaatatcgaacacgcaaggctgtgagactacctattgtagatattgcaccctatgacattggtggtcctgatcaagaatttggtgtggacgttggccctgtttgctttttataaaccaaactctatctgaaatcccaacaaaaaaaatttaactccatatgtgttcctcttgttctaatcttgtcaaccagtgcaagtgaccgacaaaattccagttatttatttccaaaatgtttggaaacagtataatttgacaaagaaaaatgatacttctctttttttgctgttccaccaaatacaattcaaatgctttttgttttatttttttaccaattccaatttcaaaatgtctcaatggtgctataataaataaacttcaacactctttatgataacaacactgtgttatattctttgaatcctagcccatctgcagagcaatgactgtgctcaccagtaaaagataacctttctttctgaaatagtcaaatacgaaattagaaaagccctccctattttaactacctcaactggtcagaaacacagattgtattctatgagtcccagaagatgaaaaaaattttatacgttgataaaacttataaatttcattgattaatctcctggaagattggtttaaaaagaaaagtgtaatgcaagaatttaaagaaatatttttaaagccacaattattttaatattggatatcaactgcttgtaaaggtgctcctcttttttcttgtcattgctggtcaagattactaatatttgggaaggctttaaagacgcatgttatggtgctaatgtactttcacttttaaactctagatcagaattgttgacttgcattcagaacataaatgcacaaaatctgtacatgtctcccatcagaaagattcattggcatgccacagggattctcctccttcatcctgtaaaggtcaacaataaaaaccaaattatggggctgcttttgtcacactagcatagagaatgtgttgaaatttaactttgtaagcttgtatgtggttgttgatcttttttttccttacagacacccataataaaatatcatattaaaattc

SEQ ID NO: 585 - DNA, 6032 bp, human; identical to SEQ ID NO: 481

SEQ ID NO: 586 - DNA, 1741 bp, human
tgggatggaggggccagtgctgacactggggctgctggctgccctggcggtgtgtggcagctgggggctgaacgaggaggagcggctgatccggcacctgtttcaagagaagggctacaacaaggagctccggcccgtggcacacaaagaggagagtgtggacgttgccctggccctcacactctccaacctcatctccctgaaagaagttgaggagaccctcactaccaatgtgtggatagagcacggctggacagacaaccggctgaagtggaatgctgaagaatttggaaacatcagtgtcctgcgcctccccccggacatggtgtggctcccagagattgtgctggagaacaacaatgacggctccttccagatctcctactcctgcaacgtgcttgtctaccactacggcttcgtgtactggctgccacctgccatcttccgctcctcctgccccatctctgtcacctatttccccttcgactggcagaactgctccctcaagttcagttccctcaagtatacggccaaagagatcaccctgagcctgaaacaggatgccaaggagaaccgcacctaccccgtggagtggatcatcattgatcctgaaggcttcacagagaacggggagtgggagatagtccaccggccggccagggtcaacgtggaccccagagcccctctggacagccccagccgccaggacatcaccttctacctcatcatccgccgcaagcccctcttctacatcatcaacatcctggtgccctgcgtgctcatctccttcatggtcaacctggtcttctacctaccggctgacagtggtgagaagacatcagtggccatctcggtgctcctggctcagtctgtcttcctgctgctcatctccaagcgtctgcctgccacatccatggccatcccccttatcggcaagttcctgctcttcggcatggtgctggtcaccatggttgtggtgatctgtgtcatcgtgctcaacatccacttccgaacacccagcacccatgtgctgtctgagggggtcaagaagctcttcctggagaccctgccggagctcctgcacatgtcccgcccagcagaggatggacccagccctggggccctggtgcggaggagcagctccctgggatacatctccaaggccgaggagtacttcctgctcaagtcccgcagtgacctcatgttcgagaagcagtcagagcggcatgggctggccaggcgcctcaccactgcacgccggcccccagcaagctctgagcaggcccagcaggaactcttcaatgagctgaagccagctgtggatggggcaaacttcattgttaaccacatgagggaccagaacaattacaatgaggagaaagacagctggaaccgagtggcccgcacagtggaccgcctctgcctgtttgtggtgacgcctgtcatggtggtgggcacagcctggatcttcctgcagggcgtttacaaccagccaccaccccagccttttcctggggacccctactcctacaacgtgcaggacaagcgcttcatctagggtgggcctgttggggagccaggagacagcagggtctgagagaggagccacagtccctaatgacacccactcctagccctgaggctcgtgcccctcagactggggaagagtccaaggaagggagggagcagccactcctcaatgctcaatggctcccctgaaatcaagacaggggccacccga

SEQ ID NO: 587 - DNA, 1246 bp, human
gaccagcctacagccgcctgcatctgtatccagcgccaggtcccgccagtcccagctgcgcgcgccccccagtcccgcacccgttcggcccaggctaagttagccctcaccatgccggtcaaaggaggcaccaagtgcatcaaatacctgctgttcggatttaacttcatcttctggcttgccgggattgctgtccttgccattggactatggctccgattcgactctcagaccaagagcatcttcgagcaagaaactaataataataattccagcttctacacaggagtctatattctgatcggagccggcgccctcatgatgctggtgggcttcctgggctgctgcggggctgtgcaggagtcccagtgcatgctgggactgttcttcggcttcctcttggtgatattcgccattgaaatagctgcggccatctggggatattcccacaaggatgaggtgattaaggaagtccaggagttttacaaggacacctacaacaagctgaaaaccaaggatgagccccagcgggaaacgctgaaagccatccactatgcgttgaactgctgtggtttggctgggggcgtggaacagtttatctcagacatctgccccaagaaggacgtactcgaaaccttcaccgtgaagtcctgtcctgatgccatcaaagaggtcttcgacaataaattccacatcatcggcgcagtgggcatcggcattgccgtggtcatgatatttggcatgatcttcagtatgatcttgtgctgtgctatccgcaggaaccgcgagatggtctagagtcagcttacatccctgagcaggaaagtttacccatgaagattggtgggattttttgtttgtttgttttgttttgtttgttgtttgttgtttgtttttttgccactaattttagtattcattctgcattgctagataaaagctgaagttactttatgtttgtcttttaatgcttcattcaatattgacatttgtagttgagcggggggtttggtttgctttggtttatattttttcagttgtttgtttttgcttgttatattaagcagaaatcctgcaatgaaaggtactatatttgctagactctagacaagatattgtacataaaagaatttttttgtctttaaatagatacaaatgtctatcaactttaatcaagttgtaacttatattgaagacaatttgatacataataaaaaattatgacaatgtcaaaaaaaaaaaaaaa

SEQ ID NO: 588 - DNA, 937 bp, human
atacacatcaggaggtggccttgagaagctgagcggagaccggctagactttactcaaagaaaccaagagactgttaccatggcagggaagcccaagcttcactacttcaatggacggggcagaatggagcccatccggtggctcttggctgcagctggagtggagtttgaagagaaatttataggatctgcagaagatttgggaaagttaagaaatgatgggagtttgatgttccagcaagtaccaatggttgagattgatgggatgaagttggtacagaccagagccattctcaactacattgccagcaaatacaacctctacgggaaagacataaaggagagagccctaattgatatgtatacagaaggtatggcagatttgaatgaaatgatccttcttctgcccttatgtcgacctgaggaaaaagatgccaagattgccttgatcaaagagaaaacaaaaagtcgctatttccctgccttcgaaaaagtgttacagagccatggacaagactaccttgttggcaacaagctgagccgggctgacattagcctggtggaacttctctactatgtggaagagcttgactccagccttatctccaacttccctctgctgaaggccctgaaaaccagaatcagcaacctgcccacggtgaagaagtttctacagcctggcagcccaaggaagcctcccgcagatgcaaaagctttagaagaagccagaaagattttcaggttttaataaagcagccatggaggctaagaacatgcaagaccaatattctaaagttttgcaacaatgaagtgctttacttaagtgttgattgtgcctgttgtaaagctaatgaaccctttccaattatatgctaattaaataataaaaactcctatttgctaacttaaaaaaaaaaaaaaaaaaaaaaaaaaaaaa

SEQ ID NO: 589 - DNA, 1540 bp, human; identical to SEQ ID NO: 485

SEQ ID NO: 590 - DNA, 1271 bp, human
ggatgaatgtgggggtggcacacagcgaagtaaaccccaacacccgagtgatgaatagccgaggcatctggctggcctacatcatcttggtaggattgctgcatatggttctactcagcatccccttcttcagcattcctgttgtctggaccctgaccaacgtcatccataacctggctacgtatgtcttccttcatacggtgaaagggacaccctttgagactcctgaccaaggaaaggcccggctactgacacactgggagcaaatggactatgggctccagtttacctcttcccgcaagttcctcagcatctctcctattgtgctctatctcctggccagcttctataccaagtatgatgctgcgcacttcctcatcaacacagcctcattgctaagtgtactgctgccgaagttgccccagttccatggggttcgtgtctttggcatcaacaaatactgagggatgggttttgggacagctccatgggcatggggaaggcactgaaacagaggactataaaacatccttctcttattctccatactgtcttctacacctttaaagcctgagaactatacaacctttcccagactcccaagaagagaagagattggcaaatggggctcctgggcccagtcctgctagtggcaagtttctttgaatcaggaaggcaggtgaggtaagggccaaatcactctcctccatagcaggaagccatttgggcagcttctttggtgattacatctttccatatcttttacacttaccaccttccagctctgttttgctgtgtatttttcttacaataatttttttcagctatagctgcagtttaatcaggatgggtagagagctgtcctcataaggctgggggtgggaagatggaatactgacctaatgtataaaacttaaaacaattctccaatcccctctcctttggtccagtaggaggtgcccttcactctaagcttaacacttagtagggaagagattctcaaatgagaaaaagggctccggctatatgggcaacaaagagggaagatacaggttgccagttatacatttatagaaagataatcccctggctttaaatagtcatgtacatacaaatatgaacaaacttaaaaaaaaaatacaaacccttggatcacatgggggcttctgggaacccccgtattcttccccctcacccaagggcagtgggcatgaatctactttttaaaaatgattaattttgacaaaaaaaaaaaaaaaaaaaaaaaaaaa

SEQ ID NO: 591 - DNA, 2784 bp, human
tcctggaattgcacgcgcttcctgaccaccaggctctggcccttgagaagccagcggggctttgtccctgttgctctccttgccaaacccagtctctctgctagtggtggtttcggttgcgacaccgtccaggttcccaggcaggaaccgctcggcctggctgcttagctacttttcactgaggaggtggtggaaggtgtcgcctgctctggctgagtaagggtggctggctgagccggcagcccccgccctaggcctggctcttcccggcctctgtactttgccctcgctgcctgacaggttctgctgtgggctctgctgaatggaagtcgctggtagtccttttccctttctccagtcggcccaccttgggacaccttgactccaagcccagcagtaagtccaacatgattcggggccgcaactcagccacctctgctgatgagcagccccacattggaaactaccggctcctcaagaccattggcaagggtaattttgccaaggtgaagttggcccgacacatcctgactgggaaagaggtagctgtgaagatcattgacaagactcaactgaactcctccagcctccagaaactattccgcgaagtaagaataatgaaggttttgaatcatcccaacatagttaaattatttgaagtgattgagactgagaaaacgctctaccttgtcatggagtacgctagtggcggagaggtatttgattacctagtggctcatggcaggatgaaagaaaaagaggctcgagccaaattccgccagatagtgtctgctgtgcagtactgtcaccagaagtttattgtccatagagacttaaaggcagaaaacctgctcttggatgctgatatgaacatcaagattgcagactttggcttcagcaatgaattcacctttgggaacaagctggacaccttctgtggcagtcccccttatgctgccccagaactcttccagggcaaaaaatatgatggacccgaggtggatgtgtggagcctaggagttatcctctatacactggtcagcggatccctgccttttgatggacagaacctcaaggagctgcgggaacgggtactgagggggaaataccgtattccattctacatgtccacggactgtgaaaacctgcttaagaaatttctcatccttaatcccagcaagagaggcactttagagcaaatcatgaaagatcgatggatgaatgtgggtcacgaagatgatgaactaaagccttacgtggagccactccctgactacaaggacccccggcggacagagctgatggtgtccatgggttatacacgggaagagatccaggactcgctggtgggccagagatacaacgaggtgatggccacctatctgctcctgggctacaagagctccgagctggaaggcgacaccatcaccctgaaaccccggccttcagctgatctaaccaatagcagcgcccaattcccatcccacaaggtacagcgaagcgtgtcggccaatcccaagcagcggcgcttcagcgaccaggctggtcctgccattcccacctctaattcttactctaagaagactcagagtaacaacgcagaaaataagcggcctgaggaggaccgggagtcagggcggaaagccagcagcacagccaaggtgcctgccagccccctgcccggtctggagaggaagaagaccaccccaaccccctccacgaacagcgtcctctccaccagcacaaatcgaagcaggaattccccacttttggagcgggccagcctcggccaggcctccatccagaatggcaaagacagcacagccccccagcgtgtccctgttgcctccccatccgcccacaacatcagcagcagtggtggagccccagaccgaactaacttcccccggggtgtgtccagccgaagcaccttccatgctgggcagctccgacaggtgcgggaccagcagaatttgccctacggtgtgaccccagcctctccctctggccacagccagggccggcggggggcctctgggagcatcttcagcaagttcacctccaagtttgtacgcaggaacctgaatgaacctgaaagcaaagaccgagtggagacgctcagacctcacgtggtgggcagtggcggcaacgacaaagaaaaggaagaatttcgggaggccaagccccgctccctccgcttcacgtggagtatgaagaccacgagctccatggagcccaacgagatgatgcgggagatccgcaaggtgctggacgcgaacagctgccagagcgagctgcatgagaagtacatgctgctgtgcatgcacggcacgccgggccacgaggacttcgtgcagtgggagatggaggtgtgcaaactgccgcggctctctctcaacggggttcgatttaagcggatatcgggcacctccatggccttcaaaaacattgcctccaaaatagccaacgagctgaagctttaacaggctgccaggagcgggggcggcgggggcgggccagctggacgggctgccggccgtgcgccgccccacctgggcgagactgcagcgatggattggtgtgtctccctgctggcacttctcccctccctggcccttctcagttttctcccacattcacccctgcccagagattcccccttctcctctcccctactggaggcaaaggaaggggagggtggatgggggggcagggctccccctcggtactgcggttgcacagagtatttcgcctaaaccaagaaattttttattaccaaaaaga

SEQ ID NO: 592 - DNA, 8374 bp, human
ggaaggggcccggatgtactgaggatgcgttacagtttcactcgaggaggcagtagtggaaaggagcagtttttggggtttgatgccataatgggaatcaggtaatcgtcggcggggaagaagaaacgctgcagaccacggcttcctcgaatcttgcgcgaaagccgccggcctcggaggagggattaatccagacccgccggggggtgttttcacatttcttcctcttcgtggctgctcctcctattaaaaccatttttggtccatggtcaatgagaatacgaggatgtacattccagaggaaaaccaccaaggttccaactatgggagcccacgccccgcccatgccaacatgaatgccaatgcggcagcggggctggcccctgagcacatccccaccccgggggctgccctgtcgtggcaggcggccatcgacgcagcccggcaggctaagctgatgggcagcgctggcaatgcgaccatctccacagtcagctccacgcagcggaagcggcagcaatatgggaaacccaagaagcagggcagcaccacggccacacgcccgccccgagccctgctctgcctgaccctgaagaaccccatccggagggcctgcatcagcattgtcgaatggaaaccatttgaaataattattttactgactatttttgccaattgtgtggccttagcgatctatattccctttccagaagatgattccaacgccaccaattccaacctggaacgagtggaatatctctttctcataatttttacggtggaagcgtttttaaaagtaatcgcctatggactcctctttcaccccaatgcctacctccgcaacggctggaacctactagattttataattgtggttgtggggctttttagtgcaattttagaacaagcaaccaaagcagatggggcaaacgctctcggagggaaaggggccggatttgatgtgaaggcgctgagggccttccgcgtgctgcgccccctgcggctggtgtccggagtcccaagtctccaggtggtcctgaattccatcatcaaggccatggtccccctgctgcacatcgccctgcttgtgctgtttgtcatcatcatctacgccatcatcggcttggagctcttcatggggaagatgcacaagacctgctacaaccaggagggcatagcagatgttccagcagaagatgacccttccccttgtgcgctggaaacgggccacgggcggcagtgccagaacggcacggtgtgcaagcccggctgggatggtcccaagcacggcatcaccaactttgacaactttgccttcgccatgctcacggtgttccagtgcatcaccatggagggctggacggacgtgctgtactgggtcaatgatgccgtaggaagggactggccctggatctattttgttacactaatcatcatagggtcattttttgtacttaacttggttctcggtgtgcttagcggagagttttccaaagagagggagaaggccaaggcccggggagatttccagaagctgcgggagaagcagcagctagaagaggatctcaaaggctacctggattggatcactcaggccgaagacatcgatcctgagaatgaggacgaaggcatggatgaggagaagccccgaaacatgagcatgcccaccagtgagaccgagtccgtcaacaccgaaaacgtggctggaggtgacatcgagggagaaaactgcggggccaggctggcccaccggatctccaagtcaaagttcagccgctactggcgccggtggaatcggttctgcagaaggaagtgccgcgccgcagtcaagtctaatgtcttctactggctggtgattttcctggtgttcctcaacacgctcaccattgcctctgagcactacaaccagcccaactggctcacagaagtccaagacacggcaaacaaggccctgctggccctgttcacggcagagatgctcctgaagatgtacagcctgggcctgcaggcctacttcgtgtccctcttcaaccgctttgactgcttcgtcgtgtgtggcggcatcctggagaccatcctggtggagaccaagatcatgtccccactgggcatctccgtgctcagatgcgtccggctgctgaggattttcaagatcacgaggtactggaactccttgagcaacctggtggcatccttgctgaactctgtgcgctccatcgcctccctgctccttctcctcttcctcttcatcatcatcttctccctcctggggatgcagctctttggaggaaagttcaactttgatgagatgcagacccggaggagcacattcgataacttcccccagtccctcctcactgtgtttcagatcctgaccggggaggactggaattcggtgatgtatgatgggatcatggcttatggcggcccctcttttccagggatgttagtctgtatttacttcatcatcctcttcatctgtggaaactatatcctactgaatgtgttcttggccattgctgtggacaacctggctgatgctgagagcctcacatctgcccaaaaggaggaggaagaggagaaggagagaaagaagctggccaggactgccagcccagagaagaaacaagagttggtggagaagccggcagtgggggaatccaaggaggagaagattgagctgaaatccatcacggctgacggagagtctccacccgccaccaagatcaacatggatgacctccagcccaatgaaaatgaggataagagcccctaccccaacccagaaactacaggagaagaggatgaggaggagccagagatgcctgtcggccctcgcccacgaccactctctgagcttcaccttaaggaaaaggcagtgcccatgccagaagccagcgcgtttttcatcttcagctctaacaacaggtttcgcctccagtgccaccgcattgtcaatgacacgatcttcaccaacctgatcctcttcttcattctgctcagcagcatttccctggctgctgaggacccggtccagcacacctccttcaggaaccatattctgttttattttgatattgtttttaccaccattttcaccattgaaattgctctgaagatgactgcttatggggctttcttgcacaagggttctttctgccggaactacttcaacatcctggacctgctggtggtcagcgtgtccctcatctcctttggcatccagtccagtgcaatcaatgtcgtgaagatcttgcgagtcctgcgagtactcaggcccctgagggccatcaacagggccaaggggctaaagcatgtggttcagtgtgtgtttgtcgccatccggaccatcgggaacatcgtgattgtcaccaccctgctgcagttcatgtttgcctgcatcggggtccagctcttcaagggaaagctgtacacctgttcagacagttccaagcagacagaggcggaatgcaagggcaactacatcacgtacaaagacggggaggttgaccaccccatcatccaaccccgcagctgggagaacagcaagtttgactttgacaatgttctggcagccatgatggccctcttcaccgtctccaccttcgaagggtggccagagctgctgtaccgctccatcgactcccacacggaagacaagggccccatctacaactaccgtgtggagatctccatcttcttcatcatctacatcatcatcatcgccttcttcatgatgaacatcttcgtgggcttcgtcatcgtcacctttcaggagcagggggagcaggagtacaagaactgtgagctggacaagaaccagcgacagtgcgtggaatacgccctcaaggcccggcccctgcggaggtacatccccaagaaccagcaccagtacaaagtgtggtacgtggtcaactccacctacttcgagtacctgatgttcgtcctcatcctgctcaacaccatctgcctggccatgcagcactacggccagagctgcctgttcaaaatcgccatgaacatcctcaacatgctcttcactggcctcttcaccgtggagatgatcctgaagctcattgccttcaaacccaagcactatttctgtgatgcatggaatacatttgacgccttgattgttgtgggtagcattgttgatatagcaatcaccgaggtaaacccagctgaacatacccaatgctctccctctatgaacgcagaggaaaactcccgcatctccatcaccttcttccgcctgttccgggtcatgcgtctggtgaagctgctgagccgtggggagggcatccggacgctgctgtggaccttcatcaagtccttccaggccctgccctatgtggccctcctgatcgtgatgctgttcttcatctacgcggtgatcgggatgcaggtgtttgggaaaattgccctgaatgataccacagagatcaaccggaacaacaactttcagaccttcccccaggccgtgctgctcctcttcaggtgtgccaccggggaggcctggcaggacatcatgctggcctgcatgccaggcaagaagtgtgccccagagtccgagcccagcaacagcacggagggtgaaacaccctgtggtagcagctttgctgtcttctacttcatcagcttctacatgctctgtgccttcctgatcatcaacctctttgtagctgtcatcatggacaactttgactacctgacaagggactggtccatccttggtccccaccacctggatgagtttaaaagaatctgggcagagtatgaccctgaagccaagggtcgtatcaaacacctggatgtggtgaccctcctccggcggattcagccgccactaggttttgggaagctgtgccctcaccgcgtggcttgcaaacgcctggtctccatgaacatgcctctgaacagcgacgggacagtcatgttcaatgccaccctgtttgccctggtcaggacggccctgaggatcaaaacagaagggaacctagaacaagccaatgaggagctgcgggcgatcatcaagaagatctggaagcggaccagcatgaagctgctggaccaggtggtgccccctgcaggtgatgatgaggtcaccgttggcaagttctacgccacgttcctgatccaggagtacttccggaagttcaagaagcgcaaagagcagggccttgtgggcaagccctcccagaggaacgcgctgtctctgcaggctggcttgcgcacactgcatgacatcgggcctgagatccgacgggccatctctggagatctcaccgctgaggaggagctggacaaggccatgaaggaggctgtgtccgctgcttctgaagatgacatcttcaggagggccggtggcctgttcggcaaccacgtcagctactaccaaagcgacggccggagcgccttcccccagaccttcaccactcagcgcccgctgcacatcaacaaggcgggcagcagccagggcgacactgagtcgccatcccacgagaagctggtggactccaccttcaccccgagcagctactcgtccaccggctccaacgccaacatcaacaacgccaacaacaccgccctgggtcgcctccctcgccccgccggctaccccagcacagtcagcactgtggagggccacgggccccccttgtcccctgccatccgggtgcaggaggtggcgtggaagctcagctccaacaggtgccactcccgggagagccaggcagccatggcgggtcaggaggagacgtctcaggatgagacctatgaagtgaagatgaaccatgacacggaggcctgcagtgagcccagcctgctctccacagagatgctctcctaccaggatgacgaaaatcggcaactgacgctcccagaggaggacaagagggacatccggcaatctccgaagaggggtttcctccgctctgcctcactaggtcgaagggcctccttccacctggaatgtctgaagcgacagaaggaccgagggggagacatctctcagaagacagtcctgcccttgcatctggttcatcatcaggcattggcagtggcaggcctgagccccctcctccagagaagccattcccctgcctcattccctaggccttttgccaccccaccagccacacctggcagccgaggctggcccccacagcccgtccccaccctgcggcttgagggggtcgagtccagtgagaaactcaacagcagcttcccatccatccactgcggctcctgggctgagaccacccccggtggcgggggcagcagcgccgcccggagagtccggcccgtctccctcatggtgcccagccaggctggggccccagggaggcagttccacggcagtgccagcagcctggtggaagcggtcttgatttcagaaggactggggcagtttgctcaagatcccaagttcatcgaggtcaccacccaggagctggccgacgcctgcgacatgaccatagaggagatggagagcgcggccgacaacatcctcagcgggggcgccccacagagccccaatggcgccctcttaccctttgtgaactgcagggacgcggggcaggaccgagccgggggcgaagaggacgcgggctgtgtgcgcgcgcggggtcgaccgagtgaggaggagctccaggacagcagggtctacgtcagcagcctgtagtgggcgctgccagatgcgggcttttttttatttgtttcaatgttcctaatgggttcgtttcagaagtgcctcactgttctcgtgacctggagttaaccggaacagcgtcttcattcatttctgttgggaccagacgcggagcctgggtgcgcgagccgccctccgggaggaaggcgcccggctgcgtctgcagaggcggggagaggaggcggcgagggtcccggggcgcgaggaaggcgcctgccctctcccagctcgcaggccccgggcccggccgcgcctctgcggggagagcaccccggcttcccgcgcgccctcaccaaaaggaccctacagcaaacgggtgtctttcgactctgcttgtagaaaccatttgcacatattctgtacgagcctcgctgtctccctagagccagggccctgcggatttggagaagggagcggggcaggacttccaggaggaccccaacccggcccggagagggaggaggaggcctccaggggcgcggagctctggggatgggcgtcgggccggcagtggtgcggctcactccgtccctgcccacctgcgacgggatcccccgaccggcacgggccacgccgagctcccggccagccgccggcccgcaggcagcgcgagggaggagctgcgccgccgggaaggggccgccggctccgcccaaccaggtggtgctgagcttccgctgagcgctcttttgttttgtggtttgacacttttcttgacagcatgttgcagtttcttttcggttttggttttttttaaatgttttattttgctttcccagcgggaggggaggaagaagagtgtttacaaagtcctgtagccccctcacctttctgttttcacttttgccaatgtacatcgggtttggttttcttgtattatttaaacggttgtggtttcctttttccacggaggttcaatagaagccgctgcaggagagttttaccaaccattgtgtatgcccaataatttgttatcatttccttaggtagtaacctatttttgttctggtttggttcggttatctaatggaaaggtaactggcaatgcacttgatgtggtcttgcacatgtgggtgatagagttgggttcctttttatgctgggtgtacaggtgggtttgggagagaggagcatgcgcgagagagtctccgagtgtgtgcgacgcgtgtgtgtgtggtgggttgtctgtgtgcatatgtcctgcccgtgtatatgcacccacaccatgtgcccgtgcacaccagtgactacgcagtcccccctttctggtttagctgtgggaagatctgaatctggggccgtttgaaagcaaaaacaaaccactgtctctgcttctgaaacgggaatcagtaactctttgcattttctgtcccacaagatatgcaaaaacaatgcaataatattcatttaaaaatacaattgtgagttgtgttggcattaaaactgtattttaaaaaaagacagaaatttaagggaaaaacacaagaaggcattttgcttcaatatattccgtgtaatgttttattgcattgataatgtttctgttgaagaaaccgttatacttgaattcaggtcagtttcagtatttttcaaatatttttttaaaactgaattgcaattgtgccaagcgaatataatgaattgaactaaaaaaaaaaaaaaaaa

SEQ ID NO: 593 - DNA, 2487 bp, human; identical to SEQ ID NO: 514

SEQ ID NO: 594 - DNA, 1109 bp, human
gcttcgccggggccgggcggccggcgcccccggctgctcccgccgccgcccggacccgcgccccgccggggcagcggtggtgagagccccgactccccggacgccgcccgccgtgccatggggttcccggccgcggcgctgctctgcgcgctgtgctgcggcctcctggccccggctgcccgcgccggctactccgaggagcgctgcagctggaggggcagcggcctcacccaggagcccggcagcgtggggcagctggccctggcctgtgcggagggcgcggttgagtggctgtacccggctggggcgctgcgcctgaccctgggcggccccgatcccagagcgcggcccggcatcgcctgtctgcggccggtgcggcccttcgcgggcgcccaggtcttcgcggagcgcgcagggggcgccctggagctgctgctggccgagggcccgggcccggcagggggccgctgcgtgcgctggggtccccgcgagcgccgggccctcttcctgcaggccacgccgcaccaggacatcagccgccgcgtggccgccttccgctttgagctgcgcgaggacgggcgccccgagctgcccccgcaggcccacggtctcggcgtagacggtgcctgcaggccctgcagcgacgctgagctgctcctggccgcatgcaccagcgacttcgtaattcacgggatcatccatggggtcacccatgacgtggagctgcaggagtctgtcatcactgtggtggccgcccgtgtcctccgccagacaccgccgctgttccaggcggggcgatccggggaccaggggctgacctccattcgtaccccactgcgctgtggcgtccacccgggcccaggcaccttcctcttcatgggctggagccgctttggggaggcccggctgggctgtgccccacgattccaggagttccgccgtgcctacgaggctgcccgtgctgcccacctccacccctgcgaggtggcgctgcactgaggggctgggtgctggggaggggctggtaggagggagggtgggcccactgctttggaggtgatgggactatcaataagaactctgttcacgcaaaaaaaaaaaaaaaaaaa

SEQ ID NO: 595 - DNA, 1764 bp, human
agaattcgggcaccaggagaaggaagccaacaggatccgacccggtgttttgtgacaaaggcaagacccccaggtctacttagagcaaagttagtagaggaggcagctaggcgtggctctcattccttcccacagaatggattataagtcgagcctgatccaggatgggaatcccatggagaacttggagaagcagctgatctgccctatctgcctggagatgtttaccaagccagtggtcatcttgccgtgccagcacaacctgtgccggaagtgtgccaatgacatcttccaggctgcaaatccctactggaccagccggggcagctcagtgtccatgtctggaggccgtttccgctgccccacctgccgccacgaggtgatcatggatcgtcacggagtgtacggcctgcagaggaacctgctggtggagaacatcatcgacatctacaaacaggagtgctccagtcggccgctgcagaagggcagtcaccccatgtgcaaggagcacgaagatgagaaaatcaacatctactgtctcacgtgtgaggtgcccacctgctccatgtgcaaggtgtttgggatccacaaggcctgcgaggtggccccattgcagagtgtcttccagggacaaaagactgaactgaataactgtatctccatgctggtggcggggaatgaccgtgtgcagaccatcatcactcagctggaggattcccgtcgagtgaccaaggagaacagtcaccaggtaaaggaagagctgagccagaagtttgacacgttgtatgccatcctggatgagaagaaaagtgagttgctgcagcggatcacgcaggagcaggagaaaaagcttagcttcatcgaggccctcatccagcagtaccaggagcagctggacaagtccacaaagctggtggaaactgccatccagtccctggacgagcctgggggagccaccttcctcttgactgccaagcaactcatcaaaagcattgtggaagcttccaagggctgccagctggggaagacagagcagggctttgagaacatggacttctttactttggatttagagcacatagcagacgccctgagagccattgactttgggacagatgaggaagaggaagaattcattgaagaagaagatcaggaagaggaagagtccacagaagggaaggaagaaggacaccagtaaggagctggatgaatgagaggcccccagatgcagagagactggagagggtggggaggggcccagcggccttggtgacaggcccagggtgggaggggtcggggcccctggaggggcaatggggaggtgatgtcttctctctgctcagagagcagggactagggtaggaccctcaccgctgcgtccagcagacactgaaccagaattggaaacgtgcttgaaacaatcacacaggacacttttctacattggtgcaaaatggaatattttgtacatttttaaaatgtgatttttgtatatacttgtatatgtatgccaatttggtgctttttgtaaaggaacttttgtataataatgcctggtcattgggtgacctgcgattgtcagaaagaggggaaggaagccaggttgatacagctgcccacttcctttcctgagcaggaggatggggtagcactcacagggacgatgtgctgtatttcagtgtctatcccagacatacggggtggtaactgagtttgtgttatatgttgttttaataaatgcacaatgctctcttcctgttcttc

SEQ ID NO: 596 - DNA, 2107 bp, human
ggaagggtcccgggaacgtggtggggcagggcctccgagcgtggttggactttgaaggggatcggcgccatgctgcatcccctttttggaattgctcaaccaggtggtaaccggcgccgcttcctggccttgggaggtggttcctttcttaacccacaagaacctctcccaagagaacttggtcctgatgtctgaccatggagatgtgagcctcccgcccgaagaccgggtgagggctctctcccagctgggtagtgcggtagaggtgaatgaagacattccaccccgtcggtacttccgctctggagttgagattatccgaatggcatccatttactctgaggaaggcaacattgaacatgccttcatcctctataacaagtatatcacgctctttattgagaaactaccaaaacatcgagattacaaatctgctgtcattcctgaaaagaaagacacagtaaagaaattaaaggagattgcatttcccaaagcagaagagctgaaggcagagctgttaaaacgatataccaaagaatatacagaatataatgaagaaaagaagaaggaagcagaggaattggcccggaacatggccatccagcaagagctggaaaaggaaaaacagagggtagcacaacagaagcagcagcaattggaacaggaacagttccatgccttcgaggagatgatccggaaccaggagctagaaaaagagcgactgaaaattgtacaggagtttgggaaggtagaccctggcctaggtggcccgctagtgcctgacttggagaagccctccttagatgtgttccccaccttaacagtctcatccatacagccttcagactgtcacacaactgtaaggccagctaagccacctgtggtggacaggtccttgaaacctggagcactgagcaactcagaaagtattcccacaatcgatggattgcgccatgtggtggtgcctgggcggctgtgcccacagtttctccagttagccagtgccaacactgcccggggagtggagacatgtggaattctctgtggaaaactgatgaggaatgaatttaccattacccatgttctcatccccaagcaaagtgctgggtctgattactgcaacacagagaacgaagaagaacttttcctcatacaggatcagcagggcctcatcacactgggctggattcatactcaccccacacagaccgcgtttctctccagtgtcgacctacacactcactgctcttaccagatgatgttgccagagtcagtagccattgtttgctcccccaagttccaggaaactggattctttaaactaactgaccatggactagaggagatttcttcctgtcgccagaaaggatttcatccacacagcaaggatccacctctgttctgtagctgcagccacgtgactgttgtggacagagcagtgaccatcacagaccttcgatgagcgtttgagtccaacaccttccaagaacaacaaaaccatatcagtgtactgtagccccttaatttaagctttctagaaagctttggaagtttttgtagatagtagaaaggggggcatcacctgagaaagagctgattttgtatttcaggtttgaaaagaaataactgaacatattttttaggcaagtcagaaagagaacatggtcacccaaaagcaactgtaactcagaaattaagttactcagaaattaagtagctcagaaattaagaaagaatggtataatgaacccccatatacccttccttctggattcaccaattgttaacatttttttcctctcagctatccttctaatttctctctaatttcaatttgtttatatttacctctgggctcaataagggcatctgtgcagaaatttggaagccatttagaaaatcttttggattttcctgtggtttatggcaatatgaatggagcttattactggggtgagggacagcttactccatttgaccagattgtttggctaacacatcccgaagaatgattttgtcaggaattattgttatttaataaatatttcaggatatttttcctctacaataaagtaacaattaacttaaaaaaaaaaaaaaaaaaaaa

SEQ ID NO: 597 - DNA, 6008 bp, human; identical to SEQ ID NO: 473

SEQ ID NO: 598 - DNA, 6534 bp, human
gggataatgctcccgagaaggattctggcagcagttctcaaaggctagacttgagtggtattgctgcatatgcgctgattcttcagcttgtctctaaccgaggaagcattgattgggagctactcattcagaaaattaaaagaaagaagccagaaaatattatcaaccctttgagaacacgacacaacgaactttatattttaccacttccttgaatagttgcaggagaaataacaaggcattgaagaatggcagatgaacggaaagacgaagcaaaggcacctcactggacctcagcaccgctaacagaggcatctgcacactcacatccacctgagattaaggatcaaggcggagcaggggaaggacttgtccgaagcgccaatggattcccatacagggaggatgaagagggtgcctttggagagcatgggtcacagggcacctattcaaataccaaagagaatgggatcaacggagagctgacctcagctgacagagaaacagcagaggaggtgtctgcaaggatagttcaagtagtcactgctgaggctgtagcagtcctgaaaggtgaacaagagaaagaagctcaacataaagaccagactgcagctctgcctttagcagctgaagaaacagctaatctgcctccttctccacccccatcacctgcctcagaacagactgtcacagtggaggaagatttacttacagcctcgaagatggagttccacgatcaacaggaattgactccctctacagctgagccttcagaccagaaggaaaaggagtcagagaagcaaagtaagcctggtgaagaccttaaacatgctgccttagtttctcagccagagacaactaaaacttaccctgataaaaaggacatgcaaggcacagaagaagaaaaagcacccctagctttgtttgggcacactcttgttgccagcctggaagacatgaaacagaagacagaaccaagccttgtagtacctggcattgacctccctaaagagcctccaactccaaaagaacaaaaggactggttcatcgaaatgccaacggaagcaaaaaaggatgagtggggtttagttgcccccatatctcctggccctctgactcccatgagggaaaaagatgtatttgatgatatcccaaaatgggaagggaaacagtttgattctcccatgccaagtccctttcaagggggaagcttcactcttcctttagatgtcatgaagaatgaaatagttacagaaacatcgccctttgcccctgcctttttacagccagatgacaaaaaatctctgcaacaaaccagtggcccagctactgccaaagatagttttaaaattgaagagccccatgaggctaaacctgacaaaatggcagaagcaccaccctcagaggcaatgaccttacccaaagatgctcacattccagttgtagaagaacatgttatggggaaagttttagaggaagaaaaggaggccataaatcaagagactgtgcagcaaagggatactttcacccccagtggacaggaacctatacttactgaaaaggaaactgagctgaagcttgaagaaaaaaccaccatttctgacaaagaagctgtgccaaaagagagtaaacccccaaaacctgcagatgaagaaataggcataattcagacctccacagagcacactttctcagaacagaaagaccaagagcctaccacagatatgttgaaacaggactcgttccctgtaagtttggagcaagcagttacagattcagccatgacctctaaaacactggagaaagccatgaccgaaccatctgcattaattgaaaagagctcaattcaggaactttttgaaatgagagttgatgacaaagataagattgaaggagttggagctgcaacatcagctgagcttgatatgccattttatgaagataaatcaggaatgtccaagtactttgaaacatctgccttgaaagaagaagcaacaaaaagcattgagccaggcagtgattactatgaactgagtgacactagagaaagtgtccatgagtctattgataccatgtctcccatgcataaaaatggtgacaaggagtttcaaacaggaaaagaatcccagcccagtcctccagcacaagaagcagggtacagcactctcgcacagagttatccatcagatttacctgaagaacccagttctcctcaagaaagaatgttcactattgatccaaaagtgtatggagagaaaagggacctccacagtaagaataaggatgatttgacccttagcaggagtttaggacttggtggtaggtctgcaatagaacaaagaagcatgtcaatcaatttgccgatgtcttgcctagattccatagcccttggatttaactttggtcggggacatgatctttctcctctggcttccgatattctaaccaacactagtggaagtatggatgaaggggatgattaccttccagccaccacacctgcactggagaaagccccttgcttccctgtagaaagcaaagaggaagaacagatagagaaagtaaaagctactggagaagaaagtactcaagcggagatatcatgtgagtctcctttcctagccaaagatttttacaaaaatggtactgtcatggcacctgaccttcctgaaatgctagatctggcaggcacaaggtcaagattggcttctgtgagtgcagatgctgaggttgccaggaggaaatcagtcccatcagagactgtggttgaggatagtcgtactggcttgcccccggtaactgatgaaaaccatgtcattgtaaaaacggacagtcagctcgaagacctgggctactgtgtgttcaataagtacacagtcccattgccatcacctgttcaagacagtgagaatttatcaggggagagtggtaccttttacgaaggcactgatgataaagttcgaagagatttggccacagacctttcactgattgaagtgaaactggcagcagccggaagagtcaaagatgagttcagtgttgacaaagaagcatccgcgcatatctctggtgacaaatcaggactgagtaaggagtttgaccaagagaagaaagctaatgataggttggatactgtactagaaaagagtgaagaacatgctgattcaaaagaacatgccaagaaaactgaagaggctggtgatgaaatagaaacattcggattaggagtaacctatgagcaagctttggccaaagatttgtcaataccaacagatgcatcctctgagaaagcagagaagggtcttagttcagttccagagatagctgaggtagaaccatccaaaaaggtggaacaaggtctggattttgctgtccagggtcaactagatgttaaaattagtgactttggacagatggcttcagggctaaacatagatgatagaagggcaacagagctaaaacttgaggctacacaggacatgaccccctcatccaaagcaccgcaggaggcagatgcatttatgggtgttgagtctggccacatgaaagaaggcactaaagttagtgagacagaagtcaaacagaaggtggccaagcctgacttggtgcaccaggaggctgtagacaaggaggagtcctatgaatctagtggtgagcatgaaagtctcaccatggagtccttgaaagctgatgagggcaagaaggaaacatctccagaatcatctctaattcaagatgagattgccgtcaaattgtcagtggaaataccttgcccacctgctgtttcagaggctgatttagccacagatgagagagctgatgtccagatggaatttattcaggggccaaaagaagaaagcaaagagaccccagatatatccatcacgccttctgatgttgcagagccattgcatgaaacgatcgtatctgaaccagcagagattcagagtgaggaagaagagatagaagcccagggagaatatgataaactgctcttccgctcagacacccttcagataactgacctgggtgtctcaggtgccagggaggaatttgtggagacctgcccaagtgaacacaaaggagtgattgagtctgttgtgaccatcgaggatgatttcatcactgtagtgcaaaccacaactgatgaaggggagtcagggtcccacagcgtgcgttttgcagccctagagcagcctgaggtggaaaggagaccatctcctcatgatgaagaagagtttgaagtagaagaggcagctgaagcccaggcagaacccaaagatggttccccagaggctccagcttcccctgagagagaagaggttgcactttctgaatataagacagaaacctatgacgattacaaagatgagaccaccattgacgactccatcatggacgctgacagcctctgggtggacactcaagatgatgataggagcatcatgacagaacagttagaaactattcctaaagaggagaaagctgaaaaggaagctcggagatcatctcttgagaaacatagaaaagaaaagccttttaaaaccgggagaggcagaatttccactcctgaaagaaaagtagctaaaaaggaacctagcacagtctccagagatgaagtgagaaggaaaaaagcagtttataagaaggctgaacttgctaaaaaaacagaagttcaggcccactctccctccaggaaattcattttaaaacctgctatcaaatatactagaccaactcatctctcctgtgttaagcggaaaaccacagcagcaggtggggaatcagctctggctcccagtgtatttaaacaggcaaaggacaaagtctctgacggagtaaccaagagcccagaaaagcgctcttctctcccaagaccttcctccattctccctcctcggcgaggtgtgtcaggagacagagatgagaattccttctctctcaacagttctatctcttcttcagcacggcggaccaccaggtcagagccaattcgcagagcagggaagagtggtacctcaacacccactacccctgggtctactgccatcactcctggcaccccaccaagttattcttcacgcacaccaggcactcctggaacccctagctatcccaggacccctcacacaccaggaacccccaagtctgccatcttggtgccgagtgagaagaaggtcgccatcatacgtactcctccaaaatctcctgcgactcccaagcagcttcggcttattaaccaaccactgccagacctgaagaatgtcaaatccaaaatcggatcaacagacaacatcaaataccagcctaaaggggggcaggtacaaattgttaccaagaaaatagacctaagccatgtgacatccaaatgtggctctctgaagaacatcggccacaggccaggtggcggacgtgtgaaaattgagagtgtaaaactagatttcaaagaaaaggcccaagctaaagttggttctcttgataatgctcatcatgtacctggaggtggtaatgtcaagattgacagccaaaagttgaacttcagagagcatgctaaagcccgtgtggaccatggggctgagatcattacacagtccccaggcagatccagcgtggcatcaccccgacgactcagcaatgtctcctcgtctggaagcatcaacctgctcgaatctcctcagcttgccactttggctgaggatgtcactgctgcactcgctaagcagggcttgtgaatatttctcatttagcattgaaataataatatttaggcatgagctcttggcaggagtgggctctgagcagttgttatattcattctttataaaccataaaataaataatctcatccccaaactgtagtaattgttacaattttctatttaaaaaatgaatagtacatgcagaaattgacctgatttccatttgcaacaggaagacactggctttacatgggttcaattggacaattatttttgctctgctctgttttgcatggagtattattattttaaaaattgcatttttacctttcatgtgcctgaaggctatccactacattctgaaggccttgttaaaatccaagctgctcatttcactattctgtttctgagtgagaagataaaaactgcccattgtaacttatttcaggttaaattaaaccaaggagtctgattgcaggaagggaagagcatgtaagaaataagtttttttaaagtgttattttgtataaatgggaagaaagattcaattaagttattaacatttgggacctggataattatatcagagtatgtcagtccaataaattatttaactaattaaaaaatagttgcaaagcatttgagctgtggttgaggaagtggtgtttagaatgtcagttgatcagctagatttgtgtccacactaccagtttcaccccccctttcatctgtttgatacagtattatagatataaatatatatatatttctctgaggccatttgggatacttcctcatatactcgaatattataacttcttattcacaggatctg

SEQ ID NO: 599 - DNA, 425 bp, human
ccagagaggggaggtgaccccaggccccaggaaagggagcgaggacagcgctggttcccggctccccgcaccatcatggctttgcctctgaggcccctgacccggggcttggccagcgctgccaaaggaggccacggaggagcaggagctcgtacctggcgtctgctgaccttcgtgctggcgctgcccagcgtggccctctgcaccttcaactcctatctccactcgggccaccgcccgcgccccgagttccgtccctaccaacacctccgcatccgcaccaagccctacccctggggggacggcaaccacactctgttccacaatagccacgtgaaccctctgcccacgggctacgaacacccctgaggccccggacgcccccggacacaataaaggtgtgaagcttaaaaaaaaaaaaaaaa

SEQ ID NO: 600 - DNA, 2821 bp, human
ggcacgaggctaaaagagtggatcatgacccatgaagagcaccatgcagccaaaaccctggggattggcaaagccattgctgtcttaacctctggtggagatgcccaaggtatgaatgctgctgtcagggctgtggttcgagttggtatcttcaccggtgcccgtgtcttctttgtccatgagggttatcaaggcctggtggatggtggagatcacatcaaggaagccacctgggagagcgtttcgatgatgcttcagctgggaggcacggtgattggaagtgcccggtgcaaggactttcgggaacgagaaggacgactccgagctgcctacaacctggtgaagcgtgggatcaccaatctctgtgtcattgggggtgatggcagcctcactggggctgacaccttccgttctgagtggagtgacttgttgagtgacctccagaaagcaggtaagatcacagatgaggaggctacgaagtccagctacctgaacattgtgggcctggttgggtcaattgacaatgacttctgtggcaccgatatgaccattggcactgactctgccctgcatcggatcatggaaattgtagatgccatcactaccactgcccagagccaccagaggacatttgtgttagaagtaatgggccgccactgtggatacctggcccttgtcacctctctgtcctgtggggccgactgggtttttattcctgaatgtccaccagatgacgactgggaggaacacctttgtcgccgactcagcgagacaaggacccgtggttctcgtctcaacatcatcattgtggctgagggtgcaattgacaagaatggaaaaccaatcacctcagaagacatcaagaatctggtggttaagcgtctgggatatgacacccgggttactgtcttggggcatgtgcagaggggtgggacgccatcagcctttgacagaattctgggcagcaggatgggtgtggaagcagtgatggcacttttggaggggaccccagataccccagcctgtgtagtgagcctctctggtaaccaggctgtgcgcctgcccctcatggaatgtgtccaggtgaccaaagatgtgaccaaggccatggatgagaagaaatttgacgaagccctgaagctgagaggccggagcttcatgaacaactgggaggtgtacaagcttctagctcatgtcagacccccggtatctaagagtggttcgcacacagtggctgtgatgaacgtgggggctccggctgcaggcatgaatgctgctgttcgctccactgtgaggattggccttatccagggcaaccgagtgctcgttgtccatgatggtttcgagggcctggccaaggggcagatagaggaagctggctggagctatgttgggggctggactggccaaggtggctctaaacttgggactaaaaggactctacccaagaagagctttgaacagatcagtgccaatataactaagtttaacattcagggccttgtcatcattgggggctttgaggcttacacagggggcctggaactgatggagggcaggaagcagtttgatgagctctgcatcccatttgtggtcattcctgctacagtctccaacaatgtccctggctcagacttcagcgttggggctgacacagcactcaatactatctgcacaacctgtgaccgcatcaagcagtcagcagctggcaccaagcgtcgggtgtttatcattgagactatgggtggctactgtggctacctggctaccatggctggactggcagctggggccgatgctgcctacatttttgaggagcccttcaccattcgagacctgcaggcaaatgttgaacatctggtgcaaaagatgaaaacaactgtgaaaaggggcttggtgttaaggaatgaaaagtgcaatgagaactataccactgacttcattttcaacctgtactctgaggaggggaagggcatcttcgacagcaggaagaatgtgcttggtcacatgcagcagggtgggagcccaaccccatttgataggaattttgccactaagatgggcgccaaggctatgaactggatgtctgggaaaatcaaagagagttaccgtaatgggcggatctttgccaatactccagattcgggctgtgttctggggatgcgtaagagggctctggtcttccaaccagtggctgagctgaaggaccagacagattttgagcatcgaatccccaaggaacagtggtggctgaaactgaggcccatcctcaaaatcctagccaagtacgagattgacttggacacttcagaccatgcccacctggagcacatcacccggaagcggtccggggaagctgccgtctaaacctctctggagtgaggggaatagattacctgatcatggtcagctcacaccctaataagtccacatcttctcagtgttttagctgtttttttcattaggtttccttttattctgtaccttgcagccatgaccagttctggccaggagctggaggagcaggcagtgggtgggagctccttttaggtagaatttaacatgacttctgccccagctttatctgtcacacaaggctgggcacctctagtgctactgctagatatcacttactcagttagaattttcctaaaaataagctttatttatttctttgtgataacaaagagtcttggttcctctactacttttactacagtgacaaattgtaactacactaataaatgccaactggtcactgtgaaaaaaaaaaaaaaaaaaaaaaaaaaaaaaaaaaaaaaaaaaaaaaaaaaaaaaaaaa

SEQ ID NO: 601 - DNA, 6534 bp, human; identical to SEQ ID NO: 598

SEQ ID NO: 602 - DNA, 1709 bp, human
aggccccgcttcgcgctaacgcttgcgatggttgaattcccctcctcacgccagcctaggagaagaagttcgtagtcccagaggtgaggcaggaggcggcagtttctggcgggtgagggcggagctgaagtgacagcggaggcggaagcaacggtcggtggggcggagaagggggctggccccaggaggaggaggaaacccttccgagaaaacagcaacaagctgagctgctgtgacagaggggaacaagatggcggcgccgaaggggagcctctgggtgaggacccaactggggctcccgccgctgctgctgctgaccatggccttggccggaggttcggggaccgcttcggctgaagcatttgactcggtcttgggtgatacggcgtcttgccaccgggcctgtcagttgacctaccccttgcacacctaccctaaggaagaggagttgtacgcatgtcagagaggttgcaggctgttttcaatttgtcagtttgtggatgatggaattgacttaaatcgaactaaattggaatgtgaatctgcatgtacagaagcatattcccaatctgatgagcaatatgcttgccatcttggttgccagaatcagctgccattcgctgaactgagacaagaacaacttatgtccctgatgccaaaaatgcacctactctttcctctaactctggtgaggtcattctggagtgacatgatggactccgcacagagcttcataacctcttcatggactttttatcttcaagccgatgacggaaaaatagttatattccagtctaagccagaaatccagtacgcaccacatttggagcaggagcctacaaatttgagagaatcatctctaagcaaaatgtcctatctgcaaatgagaaattcacaagcgcacaggaattttcttgaagatggagaaagtgatggctttttaagatgcctctctcttaactctgggtggattttaactacaactcttgtcctctcggtgatggtattgctttggatttgttgtgcaactgttgctacagctgtggagcagtatgttccctctgagaagctgagtatctatggtgacttggagtttatgaatgaacaaaagctaaacagatatccagcttcttctcttgtggttgttagatctaaaactgaagatcatgaagaagcagggcctctacctacaaaagtgaatcttgctcattctgaaatttaagcatttttcttttaaaagacaagtgtaatagacatctaaaattccactcctcatagagcttttaaaatggtttcattggatataggccttaagaaatcactataaaatgcaaataaagttactcaaatctgtgaagactgtatttgctataactttattggtattgtttttgtagtaatttaagaggtggatgtttgggattgtattattattttactaatatctgtagctattttgttttttgctttggttattgtttttttcccttttcttagctatgagctgatcattgctccttctcacctcctgccatgatactgtcagttaccttagttaacaagctgaatatttagtagaaatgatgcttctgctcaggaatggcccacaaatctgtaatttgaaatttagcaggaaatgacctttaatgacactacattttcaggaactgaaatcattaaaattttatttgaataaaaaaaaaaaaaaa

SEQ ID NO: 603 - DNA, 1901 bp, human
aaaaaacagcagggttagcttgtccctcccctccctcttcagcttcccagacactgattctggaatgaaaattcacctgcctctgagttggctcctaatgggggtgggagtgttacttcggttcccaggttggaagattatctcacccggccccagctatataagctgaccggtgtggaggggcccagcagggccaactccagggattccttccacgacagaaaaacatacaagactccttcagccaacatgatggtactgaaagtagaggaactggtcactggaaagaagaatggcaatggggaggcaggggaattccttcctgaggatttcagagatggagagtatgaagctgctgttactttagagaagcaggaggatctgaagacacttctagcccaccctgtgaccctgggggagcaacagtggaaaagcgagaaacaacgagaggcagagctcccaaagaaaaaactagaacaaagatccaagcttgaaaatttagaagaccttgaaataatcattcaactgaagaaaaggaaaaaatacaggaaaactaaagttccagttgtaaaggaaccagaacctgaaatcattacggaacctgtggatgtgcctacgtttctgaaggctgctctggagaataaactgccagtagtagaaaaattcttgtcagacaagaacaatccagatgtttgtgatgagtataaacggacagctcttcatagagcatgcttggaaggacatttggcaattgtggagaagttaatggaagctggagcccagatcgaattccgtgatatgcttgaatccacagccatccactgggcaagccgtggaggaaacctggatgttttaaaattgttgctgaataaaggagcaaaaattagcgcccgagataagttgctcagcacagcgctgcatgtggcggtgaggactggccactatgagtgcgcggagcatcttatcgcctgtgaggcagacctcaacgccaaagacagagaaggagataccccgttgcatgatgcggtgagactgaaccgctataagatgatccgactcctgattatgtatggcgcggatctcaacatcaagaactgtgctgggaagacgccgatggatctggtgctacactggcagaatggaaccaaagcaatattcgacagcctcagagagaactcctacaagacctctcgcatagctacattctgaggcaaacgacagactcttaatcagtaaatgttcactggcattttgaaggcatggcccaggagaagagacactagccataaaatctagtttctatttatcaacgtgttgtgaagatgtacctaatgaagttttgagaaagcacagggttataggtgtttaaatttcctttagtgaaactcttatttatttttatgtattcctgtttatttatttactgccacgctactgatattcagaccttcatgatcatccatctggtgagcagagcttcatttgtatataacactttcagagccttcccacccataggtagttcttaaaccaggtgaaagagcaaagttcaagtgcctacttatgtgtcattcgctcatgtaagagtttttaagagagggctgattatcacagccctcttttctcctgaatttttaatgcagaagtttgaatgaagcaagggaaggcatgtagggacaggaaaggaaacaatggaaggaaagtgattctgtgaaaaggacagtgaagccagctattttacccccaggctggattttttttttttttttttttttttttttttttaccgagtacacagagtacccaagtgaagagaacgtcatgagtgtaagtgcaaatcagtggaaggagcggcaaactgggacatgcagaattgaatttgctcaaaaaaaaaaaaaaaa

SEQ ID NO: 604 - DNA, 1561 bp, human
gagagctggaggggcgtgcgcgcgccctcgctctgttgcgcgcgcggtgtcaccttgggcgcgagcggggccgcgcgcgcacgggacccggagccgagggccattgagtggcgatggcggcgacggcgagtgccggggccggcgggatagacgggaagccccgtacctcccctaagtccgtcaagttcctgtttgggggcctggccgggatgggagctacagtttttgtccagcccctggacctggtgaagaaccggatgcagttgagcggggaaggggccaagactcgagagtacaaaaccagcttccatgccctcaccagtatcctgaaggcagaaggcctgaggggcatttacactgggctgtcggctggcctgctgcgtcaggccacctacaccactacccgccttggcatctataccgtgctgtttgagcgcctgactggggctgatggtactccccctggctttctgctgaaggctgtgattggcatgaccgcaggtgccactggtgcctttgtgggaacaccagccgaagtggctcttatccgcatgactgccgatggccggcttccagctgaccagcgccgtggctacaaaaatgtgtttaacgccctgattcgaatcacccgggaagagggtgtcctcacactgtggcggggctgcatccctaccatggctcgggccgtcgtcgtcaatgctgcccagctcgcctcctactcccaatccaagcagttcttactggactcaggctacttctctgacaacatcttgtgccacttctgtgccagcatgatcagcggtcttgtcaccactgctgcctccatgcctgtggacattgccaagacccgaatccagaacatgcggatgattgatgggaagccggaatacaagaacgggctggacgtgctgttcaaagttgtccgctacgagggcttcttcagcctgtggaagggcttcacgccgtactatgcccgcctgggcccccacaccgtcctcaccttcatcttcttggagcagatgaacaaggcctacaagcgtctcttcctcagtggctgaagcggccgggggctcccactcgcctgctgcgcctatagccactgcgccctgggggcctgggctctgctgccctggacccctctatttatttcccttccacagtgtggtttcttcctctgcggtaaaggacttggtctgttctaccccctgctccagcttgccctgctcgtcctgatcctgtgatttctctgtccttggctattcttgcagggagctggaaaacttcctgaggatttctggcctccccctgggttttagtttcagggcacacaggacagcagaagatcccctttgtcagtggggaaaccaaggcagagctgaggggacagggaggagcagaagccatcaagatggtcaaagggcctgcagagggagatgtggcccttcctccccctcattgaggacttaataaattggattgatgacaccagcaaaaaaaaaaaaaaaaaaaaaaaaaaaaaaaaaaaaaaaaaaaaaaaaaaaaaaaaaaaaaaaaaaaaaaa

SEQ ID NO: 605 - DNA, 1807 bp, human; identical to SEQ ID NO: 520

SEQ ID NO: 606 - DNA, 4086 bp, human
cgcgacctcgtggtgggctgcggtggcttcgtcaagtcggacgtggagatcaactactctctcatcgagataaagctgtacaccaagcatgggactttgaaataccagacagactgtgcccctaataatggttactttatgatccctttgtatgataagggggatttcattctgaagattgagcctcccctagggtggagttttgagccgacgaccgtggagctccatgtggatggagtcagtgacatctgcacaaagggtggggacatcaactttgtcttcactgggttctctgtgaatggcaaggtcctcagcaaagggcagcccctgggtcctgcgggagttcaggtgtctctgagaaacactgggaccgaagcaaagatccagtccacagttacacagcctggcggaaagtttgcattttttaaagttctgcctggagattatgaaatcctcgcaactcatccaacctgggcgttgaaagaggcaagcaccacagtgagtgtaaccaactccaatgccaatgcggccagtcccctcatagttgctggctacaatgtgtctggctctgtccgaagtgatggggagcccatgaaaggcgtgaagtttcttctcttttcttctttagtaactaaagaggatgtcctgggctgcaatgtctcaccagtgcctgggttccagccccaagacgagagtctggtgtatttgtgctacacggtctccagagaagatggctcgttctctttctattccttgccaagtgggggctacactgtgattccgttctatcgaggggagaggattacctttgatgtggcgccttccagacttgacttcacagtggagcatgacagcttgaaaatcgagcccgtgttccacgtcatgggattctccgtcaccgggagggtcttgaacggacccgaaggagatggtgttccagaagcagtagtcaccctgaataaccaaatcaaagttaaaacaaaagctgatggctcattccgccttgagaacataaccacagggacatacaccatccatgctcagaaagagcacctctactttgaaacggtcaccatcaaaattgcaccgaacacacctcagctggctgacattattgcaacagggttcagtgtctgtggtcagatatcaatcattcgcttccccgacaccgtcaagcagatgaataaatacaaagttgtcctgtcatctcaagacaaggacaagtctttggtcaccgtggagacagatgctcatggatcattttgttttaaagcaaaaccagggacttacaaagtgcaggtgatggttcctgaggcagaaaccagagcagggctgacgttgaaaccccagacatttcctcttactgtgaccaacaggcccatgatggatgtggcctttgtacagttcttggcatcagtttctgggaaagtctcttgcttgaacacctgtggtgacttgctggtgactctacagtccctgagccgccagggtgagaagcggagcctccagctctccggcaaggtcaacgccatgactttcacctttgacaacgtgctccctggaaaatacaaaataagcatcatgcatgaggattggtgctggaagaacaagagcctggaggtggaagtgctggaggatgacatgtctgcagttgagttcaggcagacgggctacatgctgagatgttccctgtctcacgccatcactctggaattttatcaggatggaaatgggcgtgagaatgtggggatttatagcctcttcaaaggagtcaaccgattctgcctgtccaagcctggtgtgtacaaagtgacccctcgctcctgccaccggtttgagcaagcgttctatatctatgacacgtcttcacctagtatctttacattgacagccattcgccaccatgtccttggaactatcaccaccgacaaaatgatggatgtcactgtgactatcaagtcttccatcgacagtgaacccgccttggtcttaggccctctgaagtctgtgcaggagctgcggagggagcagcagctggctgagatcgaggcccgcaggcaggagagggagaaaaacggcaatgaggaaggcgaagaaagaatgaccaagcctcccgtgcaggagatggtagatgagttacaaggccccttctcgtatgatttctcttactgggcgcggtctggagagaaaatcactgttacaccgtcatctaaagagctgctcttttatcccccttcaatggaagccgttgtcagtggagaaagctgcccagggaagctgatcgagatccatgggaaggcaggcctgtttttagaaggccagatccaccccgagttggaaggagtcgagattgtcatcagtgaaaagggggcaagttcaccgctgatcacagtctttactgatgacaaaggtgcctacagtgttggccccctgcacagtgacctggagtacacggtgacctcacagaaggagggctatgttctgactgcggtggaaggaaccatcggagacttcaaggcctatgccctggcaggcgtaagctttgagataaaagctgaggatgaccagcccctcccgggagtcctcttatccctgagcggtggcctgtttcgttccaacctcttgacccaggacaacggcattctgacattctcaaacctgagccctggccagtattacttcaaacccatgatgaaggagttccggtttgagccatcctcacagatgatcgaggtgcaggaaggccagaacctgaagatcaccatcacggggtaccgaaccgcttacagttgctatggcacagtgtcttccttaaacggagagcccgaacaaggggttgccatggaagcggtgggccagaacgactgcagcatttacggagaagacaccgtgacagacgaagagggcaagttcagattacgtggattgctgccgggatgtgtgtaccacgttcagctcaaggcagaaggcaacgaccacattgagcgggcgctcccccaccatagggtgattgaggttgggaataatgacatcgatgatgtaaacatcatagttttccggcagattaatcaatttgatttaagtggaaatgtgatcacttcctctgaataccttcctacattatgggtcaagctttacaaaagcgaaaacctcgacaatccaatccagacagtttcccttggccagtccctgttcttccatttccccccactgctcagagacggcgagaactatgttgtgcttctggactccacactccccagatcccagtatgactacatcttgcctcaagtttctttcaccgcagtgggctaccataaacacaccaccttgatttttaatcccacgaggaagctgcctgaacaggacatcgcacaaggatcctacattgccctgccattgacgctgctggttctgctggccggttacaaccatgacaagctcattcctttgctgctgcagttgacaagccggctacagggagtccgcgcgctcggccaggcagcctctgacaatagcggcccagaagatgcaaagagacaagccaagaaacagaagacaaggcggacttgaggaggaaggggacagttgcagtctcacttgggacaggccacagccaggggtccggccactacccgcccgtgggataaaagccaaaagcatgcgtcagctaacttcagcctgtgctgctgggcccgcaccccatgtcccttgtcactgtgacatcctgcacccatcctcacccctccgtagagcccctcgtgcaatgcaatgaatggaccctcctgtcactctgctgaacagaatttattttctgagtcaaatataatttattattattttcgtcaaagaagtatttaagctgtgctgtggtgtgagaatgtcattcttgatcttcagccttcgtttgcaaggagagttccagttgacgtggtgtttggttccatggcggggtaccctggggattcatctgttttcttcacttccctttgcatctgagatcctgttggaaaccacagcaacctgtattcattattaggaaataaaaatcgaaaaaaaggttcattcttttgtgttgtagttttg

SEQ ID NO: 607 - DNA, 2858 bp, human
gccaggagcccgatcgagatgatgatggttatgcagcccgagggtctgggggccggggaggggcgctttgcgggcggcggcgggggcggcgagtacatggaacaggaggaggactgggaccgcgacctgctgctggacccggcctgggagaagcagcagcggaaaaccttcactgcctggtgcaactcacacctgcgcaaggcaggcacccagatcgagaacatcgaggaagatttccgcaatggcctcaaactcatgctgctcctggaggtcatttcaggtgagaggctgcctaggccagataaaggcaagatgcgcttccacaaaatcgccaacgttaacaaggccctggacttcattgccagcaagggggttaaactggtgtccattggtgctgaagagattgttgacgggaacctgaagatgaccctgggcatgatctggaccatcatccttcgcttcgccatccaggacatctctgtggaagaaacctcagccaaggaaggcttgcttctgtggtgccagaggaagacagcaccgtaccgcaacgtcaacgtgcagaacttccacaccagctggaaggatggcctggccctctgtgccctcatccaccgacaccgccctgacctcatcgactacgccaaactgcgaaaggatgaccccatcggaaacctgaacactgcctttgaggtggcagagaaatacctggacatccccaagatgttggatgcagaagacattgtgaacaccccaaagccggatgagaaggccatcatgacctatgtgtcctgcttctaccatgcctttgccggggctgagcaggcagagacagctgccaacaggatctgcaaggtgctggcagtgaaccaggaaaacgagaagctgatggaggagtatgagaagcttgccagtgagctgctggagtggatccgccgcactgtcccatggctggagaaccgtgtgggtgagcccagcatgagtgccatgcagcgcaaactagaggactttcgggactaccggcgtctgcacaagccgccccgcattcaggaaaagtgccagctggagatcaacttcaacacactgcagaccaagttgcggctcagccaccggcctgccttcatgccctccgagggcaagctggtctcggacatcgccaacgcctggcgggggctggagcaggtggaaaagggctatgaggactggctgctctcggagatccggcgcctgcagcgactccagcacctggctgagaagttccggcagaaggcctccctgcacgaagcctggacccggggaaaggaggagatgctgagccagcgcgactacgattcggctttgctacaggaggtgcgggcgttgctgcggcgccacgaggcctttgagagcgacctggcggcgcaccaggaccgcgtggagcacattgccgcgctggcccaggagctcaatgagctggactaccacgaggcagcctcagtgaatagccgctgccaggccatctgcgatcagtgggacaacctgggcaccctgacccagaagaggcgggatgcgctagagcggatggagaagctcctggagaccattgaccagctgcaactggagtttgcccggcgggccgcgcccttcaacaactggctggatggtgccgtggaggacctgcaggacgtgtggctggtacactctgtggaggagacccagagcctgctgacagcgcacgatcagttcaaggcaacactgcccgaggctgaccgagagcgaggtgccatcatgggcatccagggtgagatccagaagatctgccagacgtatgggctgcggccctgctccaccaatccctacatcaccctcagcccgcaggacatcaacaccaagtgggatatggtccgaaagctggtgcccagccgtgaccagacactgcaggaggagctggcacggcagcaggtaaacgagaggctccggcgacagtttgcggcccaggccaatgccattggaccctggatccaggcgaaggtggaggaagtggggcggctggcagcagggctagctggctctctggaggagcagatggctgggctacggcagcaggagcagaacattatcaactacaagactaacattgaccggctggagggtgaccaccagctgctgcaggagagcctggtgttcgacaataagcacaccgtctacagcatggagcacatccgcgtgggctgggagcagctgctcacctccattgcccgcaccatcaatgaagtggagaaccaggtactgacccgagacgccaagggactgagccaggagcagctcaacgagttccgagcatccttcaaccactttgacaggaagcggaatgggatgatggagcctgatgacttccgagcttgcctcatctccatgggctatgacctgggggaagtggagtttgctcgcatcatgaccatggtggaccccaacgcagctggggtggtgaccttccaggccttcatagacttcatgacccgagagacagccgagactgacacgactgagcaagttgtagcttccttcaagatcttggcaggagacaagaactacatcacccccgaggagctgcggcgcgagctccctgccaagcaggccgagtactgcatccgccgtatggtgccctacaagggatccggggccccggctggagccctggactacgtggccttctccagtgccctctatggggagagcgacctttgaccccaaccactgaggttctctatgcaagatggagagaggatgcaccctgtggctgatcccatccgtccctcggagcaagggcctaagagaaaagccagccaagtgcttctgaataaagatccctctctgggtca

SEQ ID NO: 608 - DNA, 6032 bp, human; identical to SEQ ID NO: 481

SEQ ID NO: 609 - DNA, 1942 bp, human
caggaactgtgaagggtagatttgctgaaatggagaaacaaagacaagaggaacaaaggaagagaacggaggaggaacgaaaacgcagaattgagcaggatatgttagaaaagaggaaaatacagcgtgaattagcaaaaagggctgaacagattgaggacataaacaatacgggaactgaatcagcatcagaggaaggagatgattcactacttataactgtggtacctgtcaaatcatataaaacatctggaaaaatgaaaaagaattttgaggatctagaaaaagaacgtgaagagaaagaaaggatcaagtacgaggaagataaaagaataagatatgaagaacaacgaccatctctcaaggaagcaaagtgtctttcattagttatggatgatgaaatagaaagtgaagcaaaaatttttaaagggtaccgccctggtaaactcaaactcagttttgaagaaatggaaaggcaaagaagagaagatgaaaaaaggaaagcagaagaagaagccagaaggagaatagaggaagaaaagaaggcgtttgctgaagcaaggagaaatatggtagtagatgatgactccccagagatgtataagacaatctctcaagaatttcttacaccgggaaaactggaaattaattttgaagaattattaaaacaaaaaatggaagaagaaaaacgacgaacagaggaggaacggaagcataagctagaaatggagaaacaagaatttgaacaactgagacaggaaatgggagaggaagaggaagaaaatgaaacctttggattgagcagagaatatgaagaactgatcaaattaaaaaggagtggctctattcaagctaaaaacctaaaaagcaagtttgaaaaaattggacagttgtctgaaaaagaaatacagaaaaaaatagaagaagagcgagcaagaaggagaacaattgaccttgaaattaaagagcgagaagctgaaaattttcatgaggaagatgatgttgatgttaggcctgcaagaaaaagcgaggctccatttactcacaaagtgaatatgaaagctagatttgaacaaatggctaaggcaagagaagaagaagaacaaagaagaattgaagaacaaaagttactacgcatgcagtttgaacaaagggaaattgatgcagcactacaaaagaaaagagaagaggaggaggaggaagaaggtagcatcatgaatggctccactgctgaagatgaagagcaaaccagatcaggagctccatggttcaagaagcctcttaaaaacacatcagttgtagacagtgagccagtcagatttacggttaaagtaacaggagaacccaaaccagaaattacatggtggtttgaaggagaaatactgcaggatggagaagactatcaatatattgaaaggggagaaactcactgcctttacttaccagaaactttcccagaagatggaggagagtatatgtgtaaagcagtcaacaataaaggatctgcagctagtacctgtattcttaccattgaaagtaagaattaatcactctttttatcttttattctattaatttttttttccttaaaatcacttttcttcttctcttttttagctgatgactactagctcccctcccctctccctggaactttctctttcactccaactttcttactacatccatcttttctgtggcggggccaaaaaaggaaaccaggagtgccactatgctgacttcttattccttttcataacagtcttcaaagcacagctcatctaaagaatgcctacttcttttccaaataagcatcagatttatcgcctattatgcagtaacagtcaataaaatgtacttatgggggggaattactcaattattctatcagaacctattataaagactgtatttcccatagacgtttacagcaactatgttt

SEQ ID NO: 610 - DNA, 787 bp, human
ctgaaggtcacccgggcggccccctcactgaccctccaaacgcccctgtcctcgccctgcctcctgccattcccggcctgagtctcagcatggcggatgggagcagcgatgcggctagggaacctcgccctgcaccagccccaatcagacgccgctcctccaactaccgcgcttatgccacggagccgcacgccaagaaaaaatctaagatctccgcctcgagaaaattgcagctgaagactctgctgctgcagattgcaaagcaagagctggagcgagaggcggaggagcggcgcggagagaaggggcgcgctctgagcacccgctgccagccgctggagttgaccgggctgggcttcgcggagctgcaggacttgtgccgacagctccacgcccgtgtggacaaggtggatgaagagagatacgacatagaggcaaaagtcaccaagaacatcacggagattgcagatctgactcagaagatctttgaccttcgaggcaagtttaagcggcccaccctgcggagagtgaggatctctgcagatgccatgatgcaggcgctgctgggggcccgggctaaggagtccctggacctgcgggcccacctcaagcaggtgaagaaggaggacaccgagaaggaaaaccgggaggtgggagactggcggaagaacatcgatgcactgagtggaatggagggccgcaagaaaaagtttgagagctgagccttcctgcctactgcccctgccctgaggagggccactgaggaataaagcttctctctgagctg

SEQ ID NO: 611 - DNA, 1777 bp, human
ggctaccctcgccccgcccgcggtcctccgtcggttctctcattagtccacggtctggtcttcagctacccgccttcgtctccgagtttgcgactcgcgggaccggcgtccccggcgcgaagaggctggactcggattcgttgcctgagcaatggctgccatccggaagaaactggtgattgttggtgatggagcctgtggaaagacatgcttgctcatagtcttcagcaaggaccagttcccagaggtgtatgtgcccacagtgtttgagaactatgtggcagatatcgaggtggatggaaagcaggtagagttggctttgtgggacacagctgggcaggaagattatgatcgcctgaggcccctctcctacccagataccgatgttatactgatgtgtttttccatcgacagccctgatagtttagaaaacatcccagaaaagtggaccccagaagtcaagcatttctgtcccaacgtgcccatcatcctggttgggaataagaaggatcttcggaatgatgagcacacaaggcgggagctagccaagatgaagcaggagccggtgaaacctgaagaaggcagagatatggcaaacaggattggcgcttttgggtacatggagtgttcagcaaagaccaaagatggagtgagagaggtttttgaaatggctacgagagctgctctgcaagctagacgtgggaagaaaaaatctggttgccttgtcttgtgaaaccttgctgcaagcacagcccttatgcggttaattttgaagtgctgtttattaatcttagtgtatgattactggcctttttcatttatctataatttacctaagattacaaatcagaagtcatcttgctaccagtatttagaagccaactatgattattaacgatgtccaacccgtctggcccaccagggtccttttgacactgctctaacagccctcctctgcactcccacctgacacaccaggcgctaattcaaggaatttcttaacttcttgcttctttctagaaagagaaacagttggtaacttttgtcaattaggctgtaactactttataactaacatgtcctgccctattatctgtcagctgcaaggtactctggtgagtcaccacttcagggctttactccgtaacagattttgttggcatagctctggggtgggcagttttgaaaatgggctcaaccagaaaagcccaagttcatgcagctgtggcagagttacagttctgtggtttcatgttagttaccttatagttactgtgtaattagtgccacttaatgtatgttaccaaaaataaatatatctacccagactagatgtagtattttgtataattggattctaatactgtcatctcaagaagtgtatggtttaaagaagtgtattggaaataaagtcagatggaaattcattttaaattcccgtttgtcacttttctgataaaagatggccatattaccccttttcggccccatgtatctcagtaccccatggagctgggctaagtaaataggaattggtttcacgcctcaggcaattagacactttggaagatggcataacctgtctcacctggacttaagcgtctggctctaattcacagtgctctttctcctcactgtatccaggttccctcccagaggagccaccagttctcatgggtggcactcagtctctcttctctccagctgactaaactttttttctgtaccagttaatttttccaactactaatagaataaaggcagttttctaaaaaaa

SEQ ID NO: 612 - DNA, 1206 bp, human
ggaaggggacgcgaaccgtcctggtcccatccgagccgccgtagcgcgagtgccgcgggagttcggcagcccaggtcgccaaggcaacgggctccgctgcgggttgcgggctgcgggcgctaggctgccccggggaggcgctgcggaccggcggcccaggcacggagaggcggcgagaccgcagaattcccgtactgattagtcaacagtggaaaatctgaagagatgcaagcaggaaaaagaaattaaaccaggcctgaggagcgatgcgacaggcatgatggaggtcgagtcctcctactcggacttcatctcctgtgaccggacaggccgtcggaatgcggtccctgacatccagggagactcagaggctgtgagcgtgaggaagctggctggagacatgggcgagctggcactcgagggggcagaaggacaggtggagggaagcgccccagacaaggaagctggcaaccagccccagagcagcgatgggaccacctcgtcttgaatctgaccttgtccaagaaggctggacgagagaccttctgtcccctcccagagggggaaccctggcactggcccagcagcctcttctctgagctccatgtcccagataaaccaggccagactgagaaggctccccagaggcctctgtggcctccactccgggaaagccctctgcccacacccacaggcttcacattcccaccaccttcgcaccgtgcccaggtacactttcaagacactgtaaccacaagatgttatttattgagctggcgccgggacttgggcggggcctgccctacagtgagcagcccacacaggaacgctcctctcgcgagcggcccgggcagggaccctgtcccaacaccaacacctcctctccagcccaatcttctgggtccagacctgcttgtcccttttttagaaaacacttttaaactttttaaaaattttaaaccttttttcagcagatatggagagagctgacaatcaattcacattttttaagccattttagctaaactgtcattgtgcatctctgaggttccctcatggagctccacagatccatttttagggaagggattttggctcaaaacgatctgaccacctctgccctgtccaccaggataagtgacacctaggacccaggaaataaatgccgatgatttgtgtgaaaaaaaaaaaaaaaaaaaaaaaaaa

SEQ ID NO: 613 - DNA, 3287 bp, human
agactgaggcggaggcagccccgcgccgcgccggacccgagcatatttcattttctgtcattggactttgagccattagaaccatgagcaactacagtgtgtcactggttggcccagctccttggggtttccggctgcagggcggtaaggatttcaacatgcctctgacaatctctagtctaaaagatggcggcaaggcagcccaggcaaatgtaagaataggcgatgtggttctcagcattgatggaataaatgcacaaggaatgactcatcttgaagcccagaataagattaagggttgtacaggctctttgaatatgactctgcaaagagcatctgctgcacccaagcctgagccggttcctgttcaaaagggagaacctaaagaagtagttaaacctgtgcccattacatctcctgctgtgtccaaagtcacttccacaaacaacatggcctacaataaggcaccacggccttttggttctgtgtcttcaccaaaagtcacatccatcccatcaccatcgtctgccttcaccccagcccatgcgaccacctcatcacatgcttccccttcacccgtggctgccgtcactcctcccctgttcgctgcatctggactgcatgctaatgccaatcttagtgctgaccagtctccatctgcactgagcgctggtaaaactgcagttaatgtcccacggcagcccacagtcaccagcgtgtgttccgagacttctcaggagctagcagagggacagagaagaggatcccagggtgacagtaaacagcaaaatggcccaccaagaaaacacattgtggagcgctatacagagttttatcatgtacccactcacagtgatgccagcaagaagagactgattgaggatactgaagactggcgtccaagaactggaacaactcagtctcgctctttccgaatccttgcccagatcactgggactgaacatttgaaagaatctgaagccgataatacaaagaaggcaaataactctcaggagccttctccgcagttggcttccttggtagcttccacacggagcatgcccgagagcctggacagcccaacctctggcagaccaggggttaccagcctcacaactgcagctgccttcaagcctgtaggatccactggcgtcatcaagtcaccaagctggcaacggccaaaccaaggagtaccttccactggaagaatctcaaacagcgctacttactcaggatcagtggcaccagccaactcagctttgggacaaacccagccaagtgaccaggacactttagtgcaaagagctgagcacattccagcagggaaacgaactccgatgtgcgcccattgtaaccaggtcatcagaggaccattcttagtggcactggggaaatcttggcacccagaagaattcaactgcgctcactgcaaaaatacaatggcctacattggatttgtagaggagaaaggagccctgtattgtgagctgtgctatgagaaattctttgcccctgaatgtggtcgatgccaaaggaagatccttggagaagtcatcaatgcgttgaaacaaacttggcatgtttcctgttttgtgtgtgtagcctgtggaaagcccattcggaacaatgtttttcacttggaggatggtgaaccctactgtgagactgattattatgccctctttggtactatatgccatggatgtgaatttcccatagaagctggtgacatgttcctggaagctctgggctacacctggcatgacacttgctttgtatgctcagtgtgttgtgaaagtttggaaggtcagacctttttctccaagaaggacaagcccctgtgtaagaaacatgctcattctgtgaatttttgaaagtcaacagttcaggagaagagaaggaatttgaagagaaaaaggaaaattaaaattactaattaatttttagattcaatatttatatggagttttgaaaaataatagtggccctgaaggaataaattccagctttaaaaaccaagtctgaggaaatatttggcttcataaagtaaagagacggtttggcatttattattactttttcctgtattttatgcccataaaataagctttataaaaaccaatttcctgatggactattaaattcatcttagaataaattagtgaagaatttaattttagaataaataatccaatctgaaataattataccttctttccttgttaggtagttatgagtaaatctgcaaaaggcaatgaaaatgccttaaattttatcaataacagaattattgtatttaaaaaaaaactaatacttatctttaaaatagtaaataggattttaaacagagaattttatcagtaataggtgtcagtttttaaaaaattgcttgtaggctgagcgcggtggctcacgcctgtaatcccagcactttgggaggccaaggtgggtggaccacatgaggtcaggagtttgagatcagcctggccaacatggtgaaaccccatctctactaaaaatacaaaaattagccggacgcagtggcacgcgcctgtaatcccagctactcaagaggctgaggcacgagaatcacttgaacccgggagggagaggttgcagtgagccaagatcgtaccactgcactccagcctgggtgacagagtgagactccgtctccaaaaaaaaactttgcttgtatattatttttgccttacagtggatcattctagtaggaaaggacaataagattttttatcaaaatgtgtcatgccagtaagagatgttatattcttttcttatttcttccccacccaaaaataagctaccatatagcttataagtctcaaatttttgccttttactaaaatgtgattgtttctgttcattgtgtatgcttcatcacctatattaggcaaattccattttttcccttgcgctaaggtaaagatttaattaaataattttggcctctcatagttttctctctctttaaagagaataaatagagggccaggtgtggtggctcacgcctgtgatcccagcactttgggaggccaagacgggcggatcatgaggtcaagagatcaagatcatcctggccaacatggtgaaaccctgtctctactaaaaatacaaaaatgagctgggcatggtggggcgtgcctgtagtcccatgtacttgggaggctgaggcaggaaaattcttgaacccaggagacggaagttgcagtgagctgagatcacaccactgcactccagcctggtgacagagcaagactccggctctt

SEQ ID NO: 614 - DNA, 1831 bp, human
tgaccagcttctgagaaatagcaaaaggctaaaacacatttcaagttcccggcagtctctgcgtctgggcgggagcaattttgagggttgtattagcaatgtttttgtccagaggttatcactgagtcctgaagtcctagatttgaccagtaactctctcaagagagatgtgtccctgggaggctgcagtttaaacaaaccaccttttctaatgttgcttaaaggttctaccaggtttaacaagaccaagacttttcgtatcaaccagctgttgcaggacacaccagtggcctccccaaggagcgtgaaggtgtggcaagatgcttgctcaccacttcccaagacccaggccaatcatggagccctccagtttggggacattcccaccagccacttgctattcaagcttcctcaggagctgctgaaacccaggtcacagtttgctgtggacatgcagacaacatcctccagaggactggtgtttcacacgggcactaagaactcctttatggctctttatctttcaaaaggacgtctggtctttgcactggggacagatgggaaaaaattgaggatcaaaagcaaggagaaatgcaatgatgggaaatggcacacggtggtgtttggccatgatggggaaaaggggcgcttggttgtggatggactgagggcccgggagggaagtttgcctggaaactccaccatcagcatcagagcgccagtttacctgggatcacctccatcagggaaaccaaagagcctccccacaaacagctttgtgggatgcctgaagaactttcagctggattcaaaacccttgtataccccttcttcaagcttcggggtgtcttcctgcttgggtggtcctttggagaaaggcatttatttctctgaagaaggaggtcatgtcgtcttggctcactctgtattgttggggccagaatttaagcttgttttcagcatccgcccaagaagtctcactgggatcctaatacacatcggaagtcagcccgggaagcacttatgtgtttacctggaggcaggaaaggtcacggcctctatggacagtggggcaggtgggacctcaacgtcggtcacaccaaagcagtctctgtgtgatggacagtggcactcggtggcagtcaccataaaacaacacatcctgcacctggaactggacacagacagtagctacacagctggacagatccccttcccacctgccagcactcaagagccactacaccttggaggtgctccagccaatttgacgacactgaggatccctgtgtggaaatcattctttggctgtctgaggaatattcatgtcaatcacatccctgtccctgtcactgaagccttggaagtccaggggcctgtcagtctgaatggttgtcctgaccagtaacccaagcctatttcacagcaaggaaattcaccttcaaaagcactgattacccaatgcacctccctccccagctcgagatcattcttcactcaggacacaaaccagacaggtttaatagcgaatctaattttgaattctgaccatggatacccatcactttggcattcagtgctacatgtgtattttatataaaaatcccatttcttgaagataaaaaaattgttattcaaattgttatgcacagaatgtttttggtaatattaatttccactaaaaaattaaatgtcttttaagaaacattcttttccacttgttaaaaaaattaaatatattttaaagcactttaagaatatgaaactttcatatatgttaaaggattataatttatggaattaaaaaatgcagtgtagtccttaaaaaaaa

SEQ ID NO: 615 - DNA, 1670 bp, human
acatcttttcctttccccagaagagatccctaacctattgttttattgacagccttgctgttagaggctctttcccagaagttggacgaagaggctcaggcgttgctgtttcttgtcttccaagtcaagtggttactctggtaatggattgcctctctccgagctttcaccctggtgagactgtccagatctagtctgtaaacccagcttagaagcactgttgtaaaaatgactgaagagcccatcaaggagatcctgggagccccaaaggctcacatggcagcgacgatggagaagagccccaagagtgaagttgtgatcaccacagtccctctggtcagtgagattcagttgatggctgctacagggggtaccgagctctcctgctaccgctgcatcatcccctttgctgtggttgtcttcatcgccggcatcgtggtcaccgcggtggcttacagcttcaattcccatgggtctattatctccatctttggcctggttgttctgtcatctggactttttttactagcctccagtgccttgtgctggaaagtgagacaaaggagcaagaaagccaagagacgggagagtcaaacagctctcgtggcaaatcagagaagcttgtctgcttgagactgaatacgaccaaatgggccattgggcctggaaaacgtgctctgactttgtcacccaattcacccagaaccatggtgggagagaacagacttggcgttggagcagactggaagaatgggggtgggagggtggaggggcttctcctttgtgaggaatgactcatgtcttctttaacgacaaacttaaccctaagggctacttctgagactgaaaaatcagctttctatttacatgaaacactttgggggtcatgggagtgcacagcattagacagtatttggttcaccctgtaaagtagccaagaaaagatgagaaaaatcaagataggcctggcacactagacatttgcctccaaaagaaataacctacagtcttaagatgtatcataaaaatgttctgccaaggatctaaattaccttgggtttcgcatatgtctatgaaattctgtgataatttttttcaatacattgattcactggcgtctgttttcattttatacttttaataactcatcactggtggtactttatcttgaaaagtaatattttttatattttaacattggacagtgttagccagttgtaatgatgtatcagaagtaaagaaaaacccattaaagttatagctaatagatgctgttgggggttaaattaatagtaaaataatccaatatagcacttttgatgatttttatataaaagtcaactgtacatttcattcagaataataaatacttattgctgctaaaacttcttaaatggttgtttctgctatagttatttctattgcagttccaaattgccatcttcccttgtctcatttgcaagttctcaattgtatttctctcaaatggacaggttccttctttactggaggatttttgtttttatcatattggtttttcattacttctgaatagtcttaattacgtttactaaattctaaaggatttctgtgctattataattaggaaatcaacgtctttggtcaggaactttataatgtgctattaaatgtatattacatttttgtgg

SEQ ID NO: 616 - DNA, 5939 bp, human; identical to SEQ ID NO: 564

SEQ ID NO: 617 - DNA, 2210 bp, human
cgcgcccctccctcctcgcggacctggcggtgccggcgcccggagtggccctttaaaaggcagcttattgtccggagggggcgggcggggggcgccgaccgcggcctgaggcccggcccctcccctctccctccctctgtccccgcgtcgctcgctggctagctcgctggctcgctcgcccgtccggcgcacgctccgcctccgtcagttggctccgctgtcgggtgcgcggcgtggagcggcagccggtctggacgcgcggccggggctgggggctgggagcgcggcgcgcaagatctccccgcgcgagagcggcccctgccaccgggcgaggcctgcgccgcgatggcagagatgggcagtaaaggggtgacggcgggaaagatcgccagcaacgtgcagaagaagctcacccgcgcgcaggagaaggttctccagaagctggggaaggcagatgagaccaaggatgagcagtttgagcagtgcgtccagaatttcaacaagcagctgacggagggcacccggctgcagaaggatctccggacctacctggcctccgtcaaagccatgcacgaggcttccaagaagctgaatgagtgtctgcaggaggtgtatgagcccgattggcccggcagggatgaggcaaacaagatcgcagagaacaacgacctgctgtggatggattaccaccagaagctggtggaccaggcgctgctgaccatggacacgtacctgggccagttccccgacatcaagtcacgcattgccaagcgggggcgcaagctggtggactacgacagtgcccggcaccactacgagtcccttcaaactgccaaaaagaaggatgaagccaaaattgccaaggccgaggaggagctcatcaaagcccagaaggtgtttgaggagatgaatgtggatctgcaggaggagctgccgtccctgtggaacagccgcgtaggtttctacgtcaacacgttccagagcatcgcgggcctggaggaaaacttccacaaggagatgagcaagctcaaccagaacctcaatgatgtgctggtcggcctggagaagcaacacgggagcaacaccttcacggtcaaggcccagcccagaaagaaaagtaaactgttttcgcggctgcgcagaaagaagaacagtgacaacgcgcctgcaaaagggaacaagagcccttcgcctccagatggctcccctgccgccacccccgagatcagagtcaaccacgagccagagccggccggcggggccacgcccggggccaccctccccaagtccccatctcagccagcagaggcctcggaggtggcgggtgggacccaacctgcggctggagcccaggagccaggggagacggcggcaagtgaagcagcctccagctctcttcctgctgtcgtggtggagaccttcccagcaactgtgaatggcaccgtggagggcggcagtggggccgggcgcttggacctgcccccaggtttcatgttcaaggtacaggcccagcacgactacacggccactgacacagacgagctgcagctcaaggctggtgatgtggtgctggtgatccccttccagaaccctgaagagcaggatgaaggctggctcatgggcgtgaaggagagcgactggaaccagcacaaggagctggagaagtgccgtggcgtcttccccgagaacttcactgagagggtcccatgacggcggggcccaggcagcctccgggcgtgtgaagaacacctcctcccgaaaaatgtgtggttcttttttttgttttgttttcgtttttcatcttttgaagagcaaagggaaatcaagaggagacccccaggcagaggggcgttctcccaaagattaggtcgttttccaaagagccgcgtcccggcaagtccggcggaattcaccagtgttcctgaagctgctgtgtcctctagttgagtttctggcgcccctgcctgtgcccgcatgtgtgcctggccgcagggcggggctgggggctgccgagccaccatgcttgcctgaagcttcggccgcgccacccgggcaagggtcctcttttcctggcagctgctgtgggtggggcccagacaccagcctagcctggctctgccccgcagacggtctgtgtgctgtttgaaaataaatcttagtgttcaaaacaaaatgaaacaaaaaaaaaatgataaaaactctcaaaaaaa

SEQ ID NO: 618 - DNA, 1517 bp, human
attctttggggaggcaactaggatggtgtggccgaccacggatttgcattgccgaggacgggaccccagggcagcgaagcagaatggccaacatgcagggactggtggaaagactggaacgagctgtcagccgcctggagtcgctgtctgcagagtcccacaggccccctgggaactgcggggaagtcaatggtgtcattgcaggtgtggcaccctccgtggaagcctttgacaagctgatggacagtatggtggccgagtttttaaagaacagtaggatccttgctggggacgtggagacccatgcagaaatggtgcacagtgctttccaggcccagcgggctttccttctgatggcctctcagtaccaacaaccccacgagaatgacgtggccgcacttctgaaacccatatcggaaaagattcaggaaatccaaactttcagagagagaaaccgggggagtaacatgtttaatcatctttcggccgtcagcgaaagcatccctgcccttggatggatagctgtgtctcccaaacctggtccttatgtcaaggagatgaatgacgctgccaccttttacactaacagggtcttaaaggactacaaacacagtgatttgcgtcatgtggattgggtgaagtcatatttgaacatttggagtgaacttcaagcatacatcaaggaacaccacaccacgggcctcacatggagcaaaacaggtcctgtagcatccacagtatcagcgttttctgtcctctcctctgggcctggccttcctccaccccctcctcctctgcctcctccagggccacctccacttttcgagaatgaaggcaaaaaagaggaatcttctccttcacgctcagctttatttgcccaacttaaccagggagaagcaattacaaaagggctccgccatgtcacagatgaccagaagacatacaaaaatcccagcctgcgggctcaaggagggcaaactcaatctcccaccaaaagtcacactccaagtcccacatctcctaaatcttatccttctcaaaaacatgccccagtgttggagttggaaggaaagaaatggagagtggagtaccaagaggacaggaatgaccttgtgatttcagagactgagctgaaacaagtggcttacattttcaaatgcgaaaaatcaactattcagataaaagggaaagtaaactccattataattgacaactgtaagaaactcggcctggtgtttgacaatgtggtgggcattgtggaagtgatcaactcccaggacattcaaatccaggtaatggggagagtgccaacaatttccattaataagacagaaggttgccacatatacctcagtgaagatgcattagactgtgagatcgtgagcgccaagtcatctgaaatgaacatacttatccctcaggatggtgattatagagaatttcccattcctgaacagttcaagacagcatgggatggatccaagttaatcactgaacctgcagaaattatggcctaa

SEQ ID NO: 619 - DNA, 2467 bp, human
catctttgtcagtgcacaaaatggcgccctacagcctactggtgactcggctgcagaaagctctgggtgtgcggcagtaccatgtggcctcagtcctgtgccaacgggccaaggtggcgatgagccactttgagcccaacgagtacatccattatgacctgctagagaagaacattaacattgttcgcaaacgactgaaccggccgctgacactctcggagaagattgtgtatggacacctggatgaccccgccagccaggaaattgagcgaggcaagtcgtacctgcggctgcggccggaccgtgtggccatgcaggatgcgacggcccagatggccatgctccagttcatcagcagcgggctgtccaaggtggctgtgccatccaccatccactgtgaccatctgattgaagcccaggttgggggcgagaaagacctgcgccgggccaaggacatcaaccaggaagtttataatttcctggcaactgcaggtgccaaatatggcgtgggcttctggaagcctggatctggaatcattcaccagattattctggaaaactatgcgtaccctggtgttcttctgattggcactgactcccacacccccaatggtggcggccttgggggcatctgcattggagttgggggtgccgatgctgtggatgtcatggctgggatcccctgggagctgaagtgccccaaggtgattggcgtgaagctgacgggctctctctccggttggtcctcacccaaagatgtgatcctgaaggtggcaggcatcctcacggtgaaaggtggcacaggtgcaatcgtggaataccacgggcctggtgtagactccatctcctgcactggcatggcgacaatctgcaacatgggtgcagaaattggggccaccacttccgtgttcccttacaaccacaggatgaagaagtacctgagcaagaccggccgggaagacattgccaatctagctgatgaattcaaggatcacttggtgcctgaccctggctgccattatgaccaactaattgaaattaacctcagtgagctgaagccacacatcaatgggcccttcacccctgacctggctcaccctgtggcagaagtgggcaaggtggcagagaaggaaggatggcctctggacatccgagtgggtctaattggtagctgcaccaattcaagctatgaagatatggggcgctcagcagctgtggccaagcaggcactggcccatggcctcaagtgcaagtcccagttcaccatcactccaggttccgagcagatccgcgccaccattgagcgggacggctatgcacagatcttgagggatctgggtggcattgtcctggccaatgcttgtggcccctgcattggccagtgggacaggaaggacatcaagaagggggagaagaacacaatcgtcacctcctacaacaggaacttcacgggccgcaacgacgcaaaccccgagacccatgcctttgtcacgtccccagagattgtcacagccctggccattgcgggaaccctcaagttcaacccagagaccgactacctgacgggcacggatggcaagaagttcaggctggaggctccggatgcagatgagcttcccaaaggggagtttgacccagggcaggacacctaccagcacccacccaaggacagcagcgggcagcatgtggacgtgagccccaccagccagcgcctgcagctcctggagccttttgacaagtgggatggcaaggacctggaggacctgcagatcctcatcaaggtcaaagggaagtgtaccactgaccacatctcagctgctggcccctggctcaagttccgtgggcacttggataacatctccaacaacctgctcattggtgccatcaacattgaaaacggcaaggccaactccgtgcgcaatgccgtcactcaggagtttggccccgtccctgacactgcccgctactacaagaaacatggcatcaggtgggtggtgatcggagacgagaactacggcgagggctcgagccgggagcatgcagctctggagcctcgccaccttgggggccgggccatcatcaccaagagctttgccaggatccacgagaccaacctgaagaaacagggcctgctgcctctgaccttcgctgacccggctgactacaacaagattcaccctgtggacaagctgaccattcagggcctgaaggacttcacccctggcaagcccctgaagtgcatcatcaagcaccccaacgggacccaggagaccatcctcctgaaccacaccttcaacgagacgcagattgagtggttccgcgctggcagtgccctcaacagaatgaaggaactgcaacagtgagggcagtgcctccccgccgcgctggcgtcaagttcagctccacgtgtgccatcagtggatccgatccgtccagccatggcttcctattccaagtagtgtaaccc

SEQ ID NO: 620 - DNA, 2467 bp, human; identical to SEQ ID NO: 619

SEQ ID NO: 621 - DNA, 6783 bp, human; identical to SEQ ID NO: 552

SEQ ID NO: 622 - DNA, 1045 bp, human; identical to SEQ ID NO: 515

SEQ ID NO: 623 - DNA, 2076 bp, human
gctggagccggcgcggaggagcgggcggccgcggctgtgccctctcctactcctcaccgcgcgcgcgcggggaaccagtagccgcggctgcttcggttgccgcggtcggtggtcgttatggattctccatgggacgagttggctctggccttctcccgcacgtccatgtttcccttttttgacatcgcgcactatctagtgtcagtgatggcggtgaaacgtcagccgggagcagctgcattggcatggaagaatcctatttcaagctggtttactgctatgctccactgttttggtggaggaattttatcctgtctactgcttgcagagcctccattgaagtttcttgcaaaccacactaacatattactggcatcttcaatctggtatattacatttttttgcccgcatgacctagtttcccagggctattcatatctacctgttcaactactggcttcgggaatgaaggaagtgaccagaacttggaaaatagtaggtggagtcacacatgctaatagctattacaaaaatggctggatagtcatgatagctattggatgggcccgaggtgcaggtggtaccattataacgaattttgagaggttggtaaaaggagattggaaaccagaaggtgatgaatggctgaagatgtcataccctgccaaggtaaccctgctggggtcagttatcttcacattccagcacacccagcatctggcaatatcaaagcataatcttatgttcctttataccatctttattgtggccacaaagataaccatgatgactacacagacttctactatgacatttgctccttttgaggatacattgagttggatgctatttggctggcagcagccgttttcatcatgtgagaagaaaagtgaagcaaagtcaccttccaatggcgttgggtcattggcctcaaagccggtagatgttgcctcagataatgttaaaaagaaacatactaagaagaatgaataaatttacgtgatgagctctacaaggccaaaaattttttttcttatctacctgttatattgtgctaatttttctatgtatgtgatgtgaaatgaagactatatatatggaatggaggtgacagaaagaaagaaattctttgtttgagggagacttcccctttctggattgtatttgtagagtgttacgagtgtatcatgtgattatgctttaccggtataagagattctgttgtgattatttgaatagttttatattaataaaagaagacaaaattttttaaatgttagaaaaagcagatctgtcattgcaaagtaacaaaaattttaagcttttaaaaatgtagatttttcatatttttaaaatttgaatctatttgagctttagttcagcagaattaaatttttacttgacattatcattaaaattgctaggtatggagaacaattcctattttattttgaacactgagaagagtaaacttttcctaaaacactttatattataaatgaaaataaattgctagtttatattttagatataaacatcatattttttattaatacctacatcaaatggaaaatatctgaaattttttttccatagcaggtattttctactagaagtagttttactacttttcatttagaacagagtatgagtcttaatctgaagtctttttcatgcccttgttttaaaaaaactactttttttggcctcaaaaaaatcaagggtgtaatttttaataaattgttaatcctatgttttgtaattttcattttaggagcttgacttatttttttctctctcataaaaacacatttgttttaattgtaggagaaattttctcagcattttgcatgttctttctaatctttgttggtctgaatatattggtagtaattactgtaattattcaacaaaaagcatatccgttcaaaaatttttccactatgtcttttttctagtggctactgttttagttttctagttgaatatctctgacaagctttcgtatggttttgttatatcttcatctacatgtaatgtgttattaattttattaaatgaaaactaatcaccttc

SEQ ID NO: 624 - DNA, 2899 bp, human
cagacggcgctgagcgcggcggcggcgggagcggcgtcgagtgtctccgtgcgcccgtctgtggccaagcagccagcagcctagcagccagtcagcttgccgccggcggccaagcagccaaccatgctcaacttcggtgcctctctccagcagactgcggaggaaagaatggaaatgatttctgaaaggccaaaagagagtatgtattcctggaacaaaactgcagagaaaagtgattttgaagctgtagaagcacttatgtcaatgagctgcagttggaagtctgattttaagaaatacgttgaaaacagacctgttacaccagtatctgatttgtcagaggaagagaatctgcttccgggaacacctgattttcatacaatcccagcattttgtttgactccaccttacagtccttctgactttgaaccctctcaagtgtcaaatctgatggcaccagcgccatctactgtacacttcaagtcactctcagatactgccaaacctcacattgccgcacctttcaaagaggaagaaaagagcccagtatctgcccccaaactccccaaagctcaggcaacaagtgtgattcgtcatacagctgatgcccagctatgtaaccaccagacctgcccaatgaaagcagccagcatcctcaactatcagaacaattcttttagaagaagaacccacctaaatgttgaggctgcaagaaagaacataccatgtgccgctgtgtcaccaaacagatccaaatgtgagagaaacacagtggcagatgttgatgagaaagcaagtgctgcactttatgacttttctgtgccttcctcagagacggtcatctgcaggtctcagccagcccctgtgtccccacaacagaagtcagtgttggtctctccacctgcagtatctgcagggggagtgccacctatgccggtcatctgccagatggttccccttcctgccaacaaccctgttgtgacaacagtcgttcccagcactcctcccagccagccaccagccgtttgcccccctgttgtgttcatgggcacacaagtccccaaaggcgctgtcatgtttgtggtaccccagcccgttgtgcagagttcaaagcctccggtggtgagcccgaatggcaccagactctctcccattgcccctgctcctgggttttccccttcagcagcaaaagtcactcctcagattgattcatcaaggataaggagtcacatctgtagccacccaggatgtggcaagacatactttaaaagttcccatctgaaggcccacacgaggacgcacacaggagaaaagcctttcagctgtagctggaaaggttgtgaaaggaggtttgcccgttctgatgaactgtccagacacaggcgaacccacacgggtgagaagaaatttgcgtgccccatgtgtgaccggcggttcatgaggagtgaccatttgaccaagcatgcccggcgccatctatcagccaagaagctaccaaactggcagatggaagtgagcaagctaaatgacattgctctacctccaacccctgctcccacacagtgacagaccggaaagtgaagagtcagaactaactttggtctcagcgggagccagtggtgatgtaaaaatgcttccactgcaagtctgtggccccacaacgtgggcttaaagcagaagccccacagcctggcacgaaggccccgcctgggttaggtgactaaaagggcttcggccacaggcaggtcacagaaaggcaggtttcatttcttatcacataagagagatgagaaagcttttattcctttgaatattttttgaaggtttcagatgaggtcaacacaggtagcacagattttgaatctgtgtgcatatttgttactttacttttgctgtttatacttgagaccaacttttcaatgtgattcttctaaagcactggtttcaagaatatggaggctggaaggaaataaacattacggtacagacatggagatgtaaaatgagtttgtattattacaaatattgtcatctttttctagagttatcttctttattattcctagtctttccagtcaacatcgtggatgtagtgattaaatatatctagaactatcatttttacactattgtgaatatttggaattgaacgactgtatattgctaagagggcccaaagaattggaatcctccttaatttaattgctttgaagcatagctacaatttgtttttgcatttttgttttgaaagtttaacaaatgactgtatctaggcatttcattatgctttgaactttagtttgcctgcagtttcttgtgtagatttgaaaattgtataccaatgtgttttctgtagactctaagatacactgcactttgtttagaaaaaaaactgaagatgaaatatatattgtaaagaagggatattaagaatcttagataacttcttgaaaaagatggcttatgtcatcagtaaagtacctttatgttatgaggatataatgtgtgctttattgaattagaaaattagtgaccattattcacaggtggacaaatgttgtcctgttaatttataggagttttttggggatgtggaggtagttgggtagaaaaattattagaacattcacttttgttaacagtatttctcttttattctgttatatagtggatgatatacacagtggcaaaacaaaagtacattgcttaaaatatatagtgaaaaatgtcactatatcttcccatttaacattgtttttgtatattgggtgtagatttctgacatcaaaacttggacccttggaaaacaaaagttttaattaaaaaaaatccttgtgacttacaatttgcacaatatttcttttgttgtactttatatcttgtttacaataaagaattc

SEQ ID NO: 625 - DNA, 2412 bp, human
ctccactgaccgtcccgacgatgctacgcgcgcccggctgcctcctccggacctccgtagcgcctgccgcggccctggctgcggcgctgctctcgtcgcttgcgcgctgctctcttctagagccgagggacccggtggcctcgtcgctcagcccctatttcggcaccaagactcgctacgaggatgtcaaccccgtgctattgtcgggccccgaggctccgtggcgggaccctgagctgctggaggggacctgcaccccggtgcagctggtcgccctcattcgccacggcacccgctaccccacggtcaaacagatccgcaagctgaggcagctgcacgggttgctgcaggcccgcgggtccagggatggcggggctagtagtaccggcagccgcgacctgggtgcagcgctggccgactggcctttgtggtacgcggactggatggacgggcagctagtagaaaagggacggcaggatatgcgacagctggcgctgcgtctggcctcgctcttcccggcccttttcagccgtgagaactacggccgcctgcggctcatcaccagttccaagcaccgctgcatggatagcagcgccgccttcctgcaggggctgtggcagcactaccaccctggcttgccgccgccggacgtcgcagatatggagtttggacctccaacagttaatgataaactaatgagattttttgatcactgtgagaagtttttaactgaagtagaaaaaaatgctacagctctttatcacgtggaagccttcaaaactggaccagaaatgcagaacattttaaaaaaagttgcagctactttgcaagtgccagtaaatgatttaaatgcagatttaattcaagtagcctttttcacctgttcatttgacctggcaattaaaggtgttaaatctccttggtgtgatgtttttgacatagatgatgcaaaggtattagaatatttaaatgatctgaaacaatattggaaaagaggatatgggtatactattaacagtcgatccagctgcaccttgtttcaggatatctttcagcacttggacaaagcagttgaacagaaacaaaggtctcagccaatttcttctccagtcatcctccagtttggtcatgcagagactcttcttccactgctttctctcatgggctacttcaaagacaaggaacccctaacagcgtacaattacaaaaaacaaatgcatcggaagttccgaagtggtctcattgtaccttatgcctcgaacctgatatttgtgctttaccactgtgaaaatgctaagactcctaaagaacaattccgagtgcagatgttattaaatgaaaaggtgttacctttggcttactcacaagaaactgtttcattttatgaagatctgaagaaccactacaaggacatccttcagagttgtcaaaccagtgaagaatgtgaattagcaagggctaacagtacatctgatgaactatgagtaactgaagaacatttttaattctttaggaatctgcaatgagtgattacatgcttgtaataggtaggcaattccttgattacaggaagcttttatattacttgagtatttctgtcttttcacagaaaaacattgggtttctctctgggtttggacatgaaatgtaagaaaagatttttcactggagcagctctcttaaggagaaacaaatctatttagagaaacagctggccctgcaaatgtttacagaaatgaaattcttcctacttatataagaaatctcacactgagatagaattgtgatttcataataacacttgaaaagtgctggagtaacaaaatatctcagttggaccatccttaacttgattgaactgtctaggaactttacagattgttctgcagttctctcttcttttcctcaggtaggacagctctagcattttcttaatcaggaatattgtggtaagctgggagtatcactctggaagaaagtaacatctccagatgagaatttgaaacaagaaacagagtgttgtaaaaggacaccttcactgaagcaagtcggaaagtacaatgaaaataaatatttttggtatttatttatgaaatatttgaacattttttcaataattcctttttacttctaggaagtctcaaaagaccatcttaaattattatatgtttggacaattagcaacaagtcagatagttagaatcgaagtttttcaaatccattgcttagctaactttttcattctgtcacttggcttcgatttttatattttcctattatatgaaatgtatcttttggttgtttgatttttctttctttctttgtaaatagttctgagttctgtcaaatgccgtgaaagtatttgctataataaagaaaattcttgtgactttaaaaaaaaaaaaaaaaaaa

SEQ ID NO: 626 - DNA, 3471 bp, human
cagattacacttggttgactactccggagcagccactaagagggatgaacaggcctgcgtggaaattgaatgagattcttggaagctcgaagtctggctgtggccatgggagatacagtagtggagcctgcccccttgaagccaacttctgagcccacttctggcccaccagggaataatggggggtccctgctaagtgtcatcacggagggggtcggggaactatcagtgattgaccctgaggtggcccagaaggcctgccaggaggtgttggagaaagtcaagcttttgcatggaggcgtggcagtctctagcagaggcaccccactggagttggtcaatggggatggtgtggacagtgagatccgttgcctagatgatccacctgcccagatcagggaggaggaagatgagatgggggccgctgtggcctcaggcacagccaaaggagcaagaagacggcggcagaacaactcagctaaacagtcttggctgctgaggctgtttgagtcaaaactgtttgacatctccatggccatttcatacctgtataactccaaggagcctggagtacaagcctacattggcaaccggctcttctgctttcgcaacgaggacgtggacttctatctgccccagttgcttaacatgtacatccacatggatgaggacgtgggtgatgccattaagccctacatagtccaccgttgccgccagagcattaacttttccctccagtgtgccctgttgcttggggcctattcttcagacatgcacatttccactcaacgacactcccgtgggaccaagctacggaagctgatcctctcagatgagctaaagccagctcacaggaagagggagctgccctccttgagcccggcccctgacacagggctgtctccctccaaaaggactcaccagcgctctaagtcagatgccactgccagcataagtctcagcagcaacctgaaacgaacagccagcaaccctaaagtggagaatgaggatgaggagctctcctccagcaccgagagtattgataattcattcagttcccctgttcgactggctcctgagagagaattcatcaagtccctgatggcgatcggcaagcggctggccacgctccccaccaaagagcagaaaacacagaggctgatctcagagctctccctgctcaaccataagctccctgcccgagtctggctgcccactgctggctttgaccaccacgtggtccgtgtaccccacacacaggctgttgtcctcaactccaaggacaaggctccctacctgatttatgtggaagtccttgaatgtgaaaactttgacaccaccagtgtccctgcccggatccccgagaaccgaattcggagtacgaggtccgtagaaaacttgcccgaatgtggtattacccatgagcagcgagctggcagcttcagcactgtgcccaactatgacaacgatgatgaggcctggtcggtggatgacataggcgagctgcaagtggagctccccgaagtgcataccaacagctgtgacaacatctcccagttctctgtggacagcatcaccagccaggagagcaaggagcctgtgttcattgcagcaggggacatccgccggcgcctttcggaacagctggctcataccccgacagccttcaaacgagacccagaagatccttctgcagttgctctcaaagagccctggcaggagaaagtacggcggatcagagagggctccccctacggccatctccccaattggcggctcctgtcagtcattgtcaagtgtggggatgaccttcggcaagagcttctggcctttcaggtgttgaagcaactgcagtccatttgggaacaggagcgagtgcccctttggatcaagccatacaagattcttgtgatttcggctgatagtggcatgattgaaccagtggtcaatgctgtgtccatccatcaggtgaagaaacagtcacagctctccttgctcgattacttcctacaggagcacggcagttacaccactgaggcattcctcagtgcacagcgcaattttgtgcaaagttgtgctgggtactgcttggtctgctacctgctgcaagtcaaggacagacacaatgggaatatccttttggacgcagaaggccacatcatccacatcgactttggcttcatcctctccagctcaccccgaaatctgggctttgagacgtcagcctttaagctgaccacagagtttgtggatgtgatgggcggcctggatggcgacatgttcaactactataagatgctgatgctgcaagggctgattgccgctcggaaacacatggacaaggtggtgcagatcgtggagatcatgcagcaaggttctcagcttccttgcttccatggctccagcaccattcgaaacctcaaagagaggttccacatgagcatgactgaggagcagctgcagctgctggtggagcagatggtggatggcagtatgcggtctatcaccaccaaactctatgacggcttccagtacctcaccaacggcatcatgtgacacgctcctcagcccaggagtggtggggggtccggggcaccctccctagagggcccttgtctgagaaaccccaaaccaggaaaccccacctacccaaccatccacccaagggaaatggaaggcaagaaacacgaaggatcatgtggtaactgcgagagcttgctgaggggtgggagagccagctgtggggtccagacttgttggggcttccctgcccctcctggtctgtgtcagtattaccaccagactgactccaggactcactgccctccagaaaacagaggtgacaaatgtgagggacactggggcctttcttctccttgtaggggtctctcagaggttctttccacaggccatcctcttattccgttctggggcccaggaagtggggaagagtaggttctcggtacttaggacttgatcctgtggttggccactggccatgctgctgcccagctctacccctcccagggacctacccctcccagggaccgacccctggcccaagctccccttgctggcgggcgctgcgtgggccctgcacttgctgaggttccccatcatgggcaaggaagggaattcccacagccctccagtgtactgagggtactggcctagccatgtggaattccctaccctgactccttccccaaacccagggaaaagagctctcaattttttatttttaatttttgtttgaaataaagtccttagttagccacttgtgtcatttccaggttttctgggggagtgcagggggagatgggtgatgaggtatgaacggatgcctcagtgtccaagatacaaaaggcaccacatagaagtttgctttttccctgcctgtcttggtcactaccacctcttccctgagaagggcgggccttccatgttctctcacccgcttcaactccacat

SEQ ID NO: 627 - DNA, 980 bp, human
ggggcagacgtgggacgggaaggacggctgccgggactggcgcgcggggacactgggccgacgcgtggagtagcggggagagcgggaagcctgagggggcggggccggcgcgaggccgtgggtgcggcacgaggatgccggcggcgggacagcgcccgtaggcagccccacgggcagggcgcgcgggcggggcggggcgggccgggccagaggagctcccggcatgtcgcaagggctcccggccgccggcagcgtcctgcagaggagcgtcgcggcgcccgggaaccagccgcagccgcagccgcagcagcagagccctgaggatgatgacaggaaggtccgaaggagagaaaaaaaccgagttgctgctcagagaagtcggaagaagcagacccagaaggctgacaagctccatgaggaatatgagagcctggagcaagaaaacaccatgctgcggagagagatcgggaagctgacagaggagctgaagcacctgacagaggcactgaaggagcacgagaagatgtgcccgctgctgctctgccctatgaactttgtgccagtgcctccccggccggaccctgtggccggctgcttgccccgatgaagccggggacactcctctgcccagcaaggagccttggtcattttcatacctgggaggaaggcttttccttcacaattgtatacagggggcacctgtggccaggcctcctcctgggagctccaggaccagccagctgtgttccctgcagactgggctcagcccgacatccaacaggcgccaaactcacagagcccttgtgcagatccagcatggaggccaccctcaggagtgacttctcatccaccctggcagctagtaggttctgctgttatgcagagccatttcctctagaatttggataataaagatgcttattgtctctcccttctccagttctgggaatttacaggcacaatacacttccttttcctgg

SEQ ID NO: 628 - DNA, 5939 bp, human; identical to SEQ ID NO: 564

SEQ ID NO: 629 - DNA, 3618 bp, human
gtcggcgtaggtactttgaactcaagtaaacaaaagggaagattttctcgttgatactggagactgcacaacaatggggccacgaaagaaaagtgtgaaaacatgtatcatgaataatgaaattccagaagaaatgacagcagatgaaacaaaggactatatgaatcaactttcacatgaagtactttgccatatttttaggtacctccctctgcaggatatcatgtgtatggaatgtctttcccggaagctaaaggaagcagtgaccctatatctgcgagttgtgagagttgtagatctctgtgcagggcggtggtgggaatacatgccaagtggctttacagatgccagttttctaacactattaaagaagatgccagatgttgaacagctatatggccttcaccctcgataccttgagaggcgaagagtaaggggccatgaggcttttagcattccaggagtcctagaagctttgcaggcatgcccaaacttagtgggtgtggaaacttctcatttggagttggtagaatccatttggacatatatgccccatgttcatattttggggaaatttcgtaatcgtaatggagcttttccaattcctcctgaaaataaactgaaaattcctataggagccaaaattcaaactttacatttagttggggtgaatgttcctgaaattccttgtatcccaatgctaaggcacctttatatgaagtgggtaagactcactaaaccacagccatttaaagacttcctttgtatcagcttaagaactttcgtcatgaggaactgtgcaggacccacaaattccttgaaatatgtccctttagtaacaggcttagcctctgcccgaaacttggaacacttagaaatggttcgagttcctttccttggaggtcttatccaacatgttgttgaagacagttggagatcaggtggttttagaaatttgcacactattgttctgggagcttgcaaaaatgctcttgaagtagatcttggttacctcatcattactgctgcccgtaggttacatgaagttcggatccagccttccctaaccaaagatggtgtcttttctgccctaaagatggcagagttggagtttccccagtttgaaacccttcatctaggatatgtagatgagtttttgctacagagcagaatggctaatgcggatctggtgaagtatggtttggctgatgtggtagaaaatcctggtatcatcactgatatagggatgaaagcagtcaatgaagttttttcctgtatcaaatatctggcaatttacaattgccctcatctacacaacccatacaattggatctcagaccactcaagatggactcgattggttgatatcaacctagtacggtgccatgctttgaagctggactcttttggccagtttattgaattattacccagcctagagtttatttcactggatcagatgtttcgtgaaccacccaagggttgtgctcgagttggtctgagtgcaggcacaggaattggtgtttcatcagctcttgttagcaaccagaactccaacaatgacgataataatgcccagaataacaatgccaacatccacgacaacaatcaccatcatccagatgactcagacgaggagaatgactttcggcaagatctgcagccaggagagcagcagtttgcagctgacgcattaaatgagatggaagacatcgtccaagaagatggagaggtggtggccgagagtggaaataatactccagctcacagccaggcaattattcctgtggatgttgatgaggaacaagcaggacccagtggtcttcagcgtgtagtaaaaccaacctcaattactgttcatgattcagagagtgatgatgaagaagatagtctagaactccaagaagtctggattcctaagaacggtactcggcgttactctgaacgtgaagaaaaaactggagagtcagtgcagtccagagaattgtcagaagtagccaaaacaaagccacgtcacgccatgaaacggaagcggacagcagataaatccactagtacaagtgatcctgtgatcgaggatgaccatgtgcaggttcttgtattaaaatccaagaatcttgttggagtcactatgaccaattgtggaatcacagatctagtgctaaaagactgtccaaagatgatgttcatccatgctaccaggtgcagggtactaaaacatttaaaggtagaaaatgcaccaattgtaaaccgatttgactatgcacagtgcaagaaactgaacatggatcaggtactagaccagatactaagaatgccacccgagagaaaccgcatcatatacctacgcccaatgcagcaggtggacactctaactttggagcagaagctatttagtggtccctacccctatcacatctgtattatccatgaattcagtaaccctcccaatgtccggaataaggtgcgcattcgcagctggatggacactatagcaaacatcaatcaagagctcattaaatatgaattcttccctgaagccactcgaagtgaagaagacttaaagaaataccccaagtacccctgggggagagaaatctatactttagaaggtgttgtggatggagctccatattccatgatttctgacttcccttggctgaggtcattacgagctgcagagcccaacagcttcgctcgatacgactttgaagacgatgaagaaagcactatctatgctcctagaaggaaaggacagctgtctgcagacatctgtatggaaacaataggagaggaaatttcagagatgcgtcagatgaagaagggtgtatttcagcgagtagtggcaatttttatccactattgtgatgtcaatggagagccagttgaagatgactacatttaattggtccctcctcctttccagctattttgtcagaaagcaagtagggccatccagctgccagagtgctccacagggacttgaggcatgcagttgggaggtcctggctcggtttgctatatagggaatatataaggaacatcgaaattgtatacaaagatttgtacataaaaaatatacaaagacgcttcctaaagtaccaactttatatcatatgtttatacaatttaatttaaaaattcattttaaggaagacagataatttgaaagacttttgtttttcttgacttaattcatgaagtatcattttttgactgagtctccatttacttcattcttaatgattattgtcatccctttaaatctgtgcctttttcttcttgagcgaagctgtttgagtaaacctgttgaagagtgtttgtgtcttttgtgcttttttgttgttattaaaacaccaactaaaccttatagtcaagacaaggctctatgtttctgtacaaagctgtagttctttcttagtattatagttgccatgtttcttaaaatcaagtaaaaagacttatgagcttaaaaaaaagtgagtttgagagggaaatggaaaagtttccagagtatttctagtaatttatttccacattgaattgtgtatatgctttatcttgaatataaaataaaagtttattaaaaacttaaaaacaaaaaaaaaaaaaaaaaaa

SEQ ID NO: 630 - DNA, 1540 bp, human; identical to SEQ ID NO: 485

SEQ ID NO: 631 - protein, 606 aa, human
MDSQRELAEELRLYQSTLLQDGLKDLLDEKKFIDCTLKAGDKSLPCHRLILSACSPYFREYFLSEIDEAKKKEVVLDNVDPAILDLIIKYLYSASIDLNDGNVQDIFALASRFQIPSVFTVCVSYLQKRLAPGNCLAILRLGLLLDCPRLAISAREFVSDRFVQICKEEDFMQLSPQELISVISNDSLNVEKEEAVFEAVMKWVRTDKENRVKNLSEVFDCIRFRLMTEKYFKDHVEKDDIIKSNPDLQKKIKVLKDAFAGKLPEPSKNAAKTGAGEVNGDVGDEDLLPGYLNDIPRHGMFVKDLILLVNDTAAVAYDPTENECYLTALAEQIPRNHSSIVTQQNQIYVVGGLYVDEENKDQPLQSYFFQLDSIASEWVGLPPLPSARCLFGLGEVDDKIYVVAGKDLQTEASLDSVLCYDPVAAKWNEVKKLPIKVYGHNVISHKGMIYCLGGKTDDKKCTNRVFIFNPKKGDWKDLAPMKIPRSMFGVAVHKGKIVIAGGVTEDGLSASVEAFDLTTNKWDVMTEFPQERSSISLVSLAGSLYAIGGFAMIQLESKEFAPTEVNDIWKYEDDKKEWAGMLKEIRYASGASCLATRLNLFKLSKL

SEQ ID NO: 632 - protein, 153 aa, human
GLSDGEWQLVLNVWGKVEADIPGHGQEVLIRLFKGHPETLEKFDKFKHLKSEDEMKASEDLKKHGATVLTALGGILKKKGHHEAEIKPLAQSHATKHKIPVKYLEFISECIIQVLQSKHPGDFGADAQGAMNKALELFRKDMASNYKELGFQG

SEQ ID NO: 633 - protein, 1935 aa, human
MGDSEMAVFGAAAPYLRKSEKERLEAQTRPFDLKKDVFVPDDKQEFVKAKIVSREGGKVTAETEYGKTVTVKEDQVMQQNPPKFDKIEDMAMLTFLHEPAVLYNLKDRYGSWMIYTYSGLFCVTVNPYKWLPVYTPEVVAAYRGKKRSEAPPHIFSISDNAYQYMLTDRENQSILITGESGAGKTVNTKRVIQYFAVIAAIGDRSKKDQSPGKGTLEDQIIQANPALEAFGNAKTVRNDNSSRFGKFIRIHFGATGKLASADIETYLLEKSRVIFQLKAERDYHIFYQILSNKKPELLDMLLITNNPYDYAFISQGETTVASIDDAEELMATDNAFDVLGFTSEEKNSMYKLTGAIMHFGNMKFKLKQREEQAEPDGTEEADKSAYLMGLNSADLLKGLCHPRVKVGNEYVTKGQNVQQVIYATGALAKAVYERMFNWMVTRINATLETKQPRQYFIGVLDIAGFEIFDFNSFEQLCINFTNEKLQQFFNHHMFVLEQEEYKKEGIEWTFIDFGMDLQACIDLIEKPMGIMSILEEECMFPKATDMTFKAKLFDNHLGKSANFQKPRNIKGKPEAHFSLIHYAGIVDYNIIGWLQKNKDPLNETVVGLYQKSSLKLLSTLFANYAGADAPIEKGKGKAKKGSSFQTVSALHRENLNKLMTNLRSTHPHFVRCIIPNETKSPGVMDNPLVMHQLRCNGVLEGIRICRKGFPNRILYGDFRQRYRILNPAAIPEGQFIDSRKGAEKLLSSLDIDHNQYKFGHTKVFFKAGLLGLLEEMRDERLSRIITRIQAQSRGVLARMEYKKLLERRDSLLVIQWNIRAFMGVKNWPWMKLYFKIKPLLKSAEREKEMASMKEEFTRLKEALEKSEARRKELEEKMVSLLQEKNDLQLQVQAEQDNLADAEERCDQLIKNKIQLEAKVKEMNERLEDEEEMNAELTAKKRKLEDECSELKRDIDDLELTLAKVEKEKHATENKVKNLTEEMAGLDEIIAKLTKEKKALQEAHQQALDDLQAEEDKVNTLTKAKVKLEQQVDDLEGSLEQEKKVRMDLERAKRKLEGDLKLTQESIMDLENDKQQLDERLKKKDFELNALNARIEDEQALGSQLQKKLKELQARIEELEEELESERTARAKVEKLRSDLSRELEEISERLEEAGGATSVQIEMNKKREAEFQKMRRDLEEATLQHEATAAALRKKHADSVAELGEQIDNLQRVKQKLEKEKSEFKLELDDVTSNMEQIIKAKANLEKMCRTLEDQMNEHRSKAEETQRSVNDLTSQRAKLQTENGELSRQLDEKEALISQLTRGKLTYTQQLEDLKRQLEEEVKAKNALAHALQSARHDCDLLREQYEEETEAKAELQRVLSKANSEVAQWRTKYETDAIQRTEELEEAKKKLAQRLQEAEEAVEAVNAKCSSLEKTKHRLQNEIEDLMVDVERSNAAAAALDKKQRNFDKILAEWKQKYEESQSELESSQKEARSLSTELFKLKNAYEESLEHLETFKRENKNLQEEISDLTEQLGSSGKTIHELEKVRKQLEAEKMELQSALEEAEASLEHEEGKILRAQLEFNQIKAEIERKLAEKDEEMEQAKRNHLRVVDSLQTSLDAETRSRNEALRVKKKMEGDLNEMEIQLSHANRMAAEAQKQVKSLQSLLKDTQIQLDDAVRANDDLKENIAIVERRNNLLQAELEELRAVVEQTERSRKLAEQELIETSERVQLLHSQNTSLINQKKKMDADLSQLQTEVEEAVQECRNAEEKAKKAITDAAMMAEELKKEQDTSAHLERMKKNMEQTIKDLQHRLDEAEQIALKGGKKQLQKLEARVRELENELEAEQKRNAESVKGMRKSERRIKELTYQTEEDRKNLLRLQDLVDKLQLKVKAYKRQAEEAEEQANTNLSKFRKVQHELDEAEERADIAESQVNKLRAKSRDIGTKGLNEE

SEQ ID NO: 634 - protein, 395 aa, human
QSALEEAEASLEHEEGKILRAQLEFNQIKAEIERKLAEKDEEMEQAKRNHLRVVDSLQTSLDAETRSRNEALRVKKKMEGDLNEMEIQLSHANRMAAEAQKQVKSLQSLLKDTQIQLDDAVRANDDLKENIAIVERRNNLLQAELEELRAVVEQTERSRKLAEQELIETSERVQLLHSQNTSLINQKKKMDADLSQLQTEVEEAVQECRNAEEKAKKAITDAAMMAEELKKEQDTSAHLERMKKNMEQTIKDLQHRLDEAEQIALKGGKKQLQKLEARVRELENELEAEQKRNAESVKGMRKSERRIKELTYQTEEDRKNLLRLQDLVDKLQLKVKAYKRQAEEAEEQANTNLSKFRKVQHELDEAEERADIAESQVNKLRAKSRDIGTKGLNEE

SEQ ID NO: 635 - protein, 224 aa, human
MELYETSPYFYQEPRFYDGENYLPVHLQGFEPPGYERTELTLSPEAPGPLEDKGLGTPEHCPGQCLPWACKVCKRKSVSVDRRRAATLREKRRLKKVNEAFEALKRSTLLNPNQRLPKVEILRSAIQYIERLQALLSSLNQEERDLRYRGGGGPQPGVPSECSSHSASCSPEWGSALEFSANPGDHLLTADPTDAHNLHSLTSIVDSITVEDVSVAFPDETMPN

SEQ ID NO: 636 - protein, 747 aa, human
MPLFKLPAEEKQIDDAMRNFAEKVFASEVKDEGGRQEISPFDVDEICPISHHEMQAHIFHLETLSTSTEARRKKRFQGRKTVNLSIPLSETSSTKLSHIDEYISSSPTYQTVPDFQRVQITGDYASGVTVEDFEIVCKGLYRALCIREKYMQKSFQRFPKTPSKYLRNIDGEAWVANESFYPVFTPPVKKGEDPFRTDNLPENLGYHLKMKDGVVYVYPNEAAVSKDEPKPLPYPNLDTFLDDMNFLLALIAQGPVKTYTHRRLKFLSSKFQVHQMLNEMDELKELKNNPHRDFYNCRKVDTHIHAAACMNQKHLLRFIKKSYQIDADRVVYSTKEKNLTLKELFAKLKMHPYDLTVDSLDVHAGRQTFQRFDKFNDKYNPVGASELRDLYLKTDNYINGEYFATIIKEVGADLVEAKYQHAEPRLSIYGRSPDEWSKLSSWFVCNRIHCPNMTWMIQVPRIYDVFRSKNFLPHFGKMLENIFMPVFEATINPQADPELSVFLKHITGFDSVDDESKHSGHMFSSKSPKPQEWTLEKNPSYTYYAYYMYANIMVLNSLRKERGMNTFLFRPHCGEAGALTHLMTAFMIADDISHGLNLKKSPVLQYLFFLAQIPIAMSPLSNNSLFLEYAKNPFLDFLQKGLMISLSTDDPMQFHFTKEPLMEEYAIAAQVFKLSTCDMCEVARNSVLQCGISHEEKVKFLGDNYLEEGPAGNDIRRTNVAQIRMAYRYETWCYELNLIAEGLKSTE

SEQ ID NO: 637 - protein, 606 aa, human; identical to SEQ ID NO: 631

SEQ ID NO: 638 - protein, 146 aa, human
VHLTPEEKSAVTALWGKVNVDEVGGEALGRLLVVYPWTQRFFESFGDLSTPDAVMGNPKVKAHGKKVLGAFSDGLAHLDNLKGTFATLSELHCDKLHVDPENFRLLGNVLVCVLAHHFGKEFTPPVQAAYQKVVAGVANALAHKYH

SEQ ID NO: 639 - protein, 2138 aa, human
MVNENTRMYIPEENHQGSNYGSPRPAHANMNANAAAGLAPEHIPTPGAALSWQAAIDAARQAKLMGSAGNATISTVSSTQRKRQQYGKPKKQGSTTATRPPRALLCLTLKNPIRRACISIVEWKPFEIIILLTIFANCVALAIYIPFPEDDSNATNSNLERVEYLFLIIFTVEAFLKVIAYGLLFHPNAYLRNGWNLLDFIIVVVGLFSAILEQATKADGANALGGKGAGFDVKALRAFRVLRPLRLVSGVPSLQVVLNSIIKAMVPLLHIALLVLFVIIIYAIIGLELFMGKMHKTCYNQEGIADVPAEDDPSPCALETGHGRQCQNGTVCKPGWDGPKHGITNFDNFAFAMLTVFQCITMEGWTDVLYWVNDAVGRDWPWIYFVTLIIIGSFFVLNLVLGVLSGEFSKEREKAKARGDFQKLREKQQLEEDLKGYLDWITQAEDIDPENEDEGMDEEKPRNMSMPTSETESVNTENVAGGDIEGENCGARLAHRISKSKFSRYWRRWNRFCRRKCRAAVKSNVFYWLVIFLVFLNTLTIASEHYNQPNWLTEVQDTANKALLALFTAEMLLKMYSLGLQAYFVSLFNRFDCFVVCGGILETILVETKIMSPLGISVLRCVRLLRIFKITRYWNSLSNLVASLLNSVRSIASLLLLLFLFIIIFSLLGMQLFGGKFNFDEMQTRRSTFDNFPQSLLTVFQILTGEDWNSVMYDGIMAYGGPSFPGMLVCIYFIILFICGNYILLNVFLAIAVDNLADAESLTSAQKEEEEEKERKKLARTASPEKKQELVEKPAVGESKEEKIELKSITADGESPPATKINMDDLQPNENEDKSPYPNPETTGEEDEEEPEMPVGPRPRPLSELHLKEKAVPMPEASAFFIFSSNNRFRLQCHRIVNDTIFTNLILFFILLSSISLAAEDPVQHTSFRNHILFYFDIVFTTIFTIEIALKMTAYGAFLHKGSFCRNYFNILDLLVVSVSLISFGIQSSAINVVKILRVLRVLRPLRAINRAKGLKHVVQCVFVAIRTIGNIVIVTTLLQFMFACIGVQLFKGKLYTCSDSSKQTEAECKGNYITYKDGEVDHPIIQPRSWENSKFDFDNVLAAMMALFTVSTFEGWPELLYRSIDSHTEDKGPIYNYRVEISIFFIIYIIIIAFFMMNIFVGFVIVTFQEQGEQEYKNCELDKNQRQCVEYALKARPLRRYIPKNQHQYKVWYVVNSTYFEYLMFVLILLNTICLAMQHYGQSCLFKIAMNILNMLFTGLFTVEMILKLIAFKPKHYFCDAWNTFDALIVVGSIVDIAITEVNPAEHTQCSPSMNAEENSRISITFFRLFRVMRLVKLLSRGEGIRTLLWTFIKSFQALPYVALLIVMLFFIYAVIGMQVFGKIALNDTTEINRNNNFQTFPQAVLLLFRCATGEAWQDIMLACMPGKKCAPESEPSNSTEGETPCGSSFAVFYFISFYMLCAFLIINLFVAVIMDNFDYLTRDWSILGPHHLDEFKRIWAEYDPEAKGRIKHLDVVTLLRRIQPPLGFGKLCPHRVACKRLVSMNMPLNSDGTVMFNATLFALVRTALRIKTEGNLEQANEELRAIIKKIWKRTSMKLLDQVVPPAGDDEVTVGKFYATFLIQEYFRKFKKRKEQGLVGKPSQRNALSLQAGLRTLHDIGPEIRRAISGDLTAEEELDKAMKEAVSAASEDDIFRRAGGLFGNHVSYYQSDGRSAFPQTFTTQRPLHINKAGSSQGDTESPSHEKLVDSTFTPSSYSSTGSNANINNANNTALGRLPRPAGYPSTVSTVEGHGPPLSPAIRVQEVAWKLSSNRCHSRESQAAMAGQEETSQDETYEVKMNHDTEACSEPSLLSTEMLSYQDDENRQLTLPEEDKRDIRQSPKRGFLRSASLGRRASFHLECLKRQKDRGGDISQKTVLPLHLVHHQALAVAGLSPLLQRSHSPASFPRPFATPPATPGSRGWPPQPVPTLRLEGVESSEKLNSSFPSIHCGSWAETTPGGGGSSAARRVRPVSLMVPSQAGAPGRQFHGSASSLVEAVLISEGLGQFAQDPKFIEVTTQELADACDMTIEEMESAADNILSGGAPQSPNGALLPFVNCRDAGQDRAGGEEDAGCVRARGRPSEEELQDSRVYVSSL

SEQ ID NO: 640 - protein, 102 aa, human
IERLQDLLHRLDQQEKMQELGVDPFSYRPKQENLEGADFLRTCSSQWPSVSDHSRGLVITAKEGGASIDSSASSSLRCLSSIVDSISSEERKLPCVEEVVEK

SEQ ID NO: 641 - protein, 1940 aa, human
MSSDTEMEVFGIAAPFLRKSEKERIEAQNQPFDAKTYCFVVDSKEEYAKGKIKSSQDGKVTVETEDNRTLVVKPEDVYAMNPPKFDRIEDMAMLTHLNEPAVLYNLKDRYTSWMIYTYSGLFCVTVNPYKWLPVYNPEVVEGYRGKKRQEAPPHIFSISDNAYQFMLTDRENQSILITGESGAGKTVNTKRVIQYFATIAATGDLAKKKDSKMKGTLEDQIISANPLLEAFGNAKTVRNDNSSRFGKFIRIHFGTTGKLASADIETYLLEKSRVTFQLKAERSYHIFYQILSNKKPELIELLLITTNPYDYPFISQGEILVASIDDREELLATDSAIDILGFTPEEKSGLYKLTGAVMHYGNMKFKQKQREEQAEPDGTEVADKTAYLMGLNSSDLLKALCFPRVKVGNEYVTKGQTVDQVHHAVNALSKSVYEKLFLWMVTRINQQLDTKLPRQHFIGVLDIAGFEIFEYNSLEQLCINFTNEKLQQFFNHHMFVLEQEEYKKEGIEWTFIDFGMDLAACIELIEKPMGIFSILEEECMFPKATDTSFKNKLYDQHLGKSNNFQKPKVVKGRAEAHFSLIHYAGTVDYSVSGWLEKNKDPLNETVVGLYQKSSNRLLAHLYATFATADADSGKKKVAKKKGSSFQTVSALFRENLNKLMSNLRTTHPHFVRCIIPNETKTPGAMEHSLVLHQLRCNGVLEGIRICRKGFPNRILYGDFKQRYRVLNASAILEGQFIDSKKACEKLLASIDIDHTQYKFGHTKVFFKAGLLGTLEEMRDDRLAKLITRTQAVCRGFLMRVEFQKMVQRRESIFCIQYNIRSFMNVKHWPWMKLFFKIKPLLKSAETEKEMATMKEEFQKTKDELAKSEAKRKELEEKLVTLVQEKNDLQLQVQAESENLLDAEERCDQLIKAKFQLEAKIKEVTERAEDEEEINAELTAKKRKLEDECSELKKDIDDLELTLAKVEKEKHATENKVKNLTEELSGLDETIAKLTREKKALQEAHQQALDDLQAEEDKVNSLNKTKSKLEQQVEDLESSLEQEKKLRVDLERNKRKLEGDLKLAQESILDLENDKQQLDERLKKKDFEYCQLQSKVEDEQTLGLQFQKKIKELQARIEELEEEIEAERATRAKTEKQRSDYARELEELSERLEEAGGVTSTQIELNKKREAEFLKLRRDLEEATLQHEAMVATLRKKHADSVAELGEQIDNLQRVKQKLEKEKSEFKLEIDDLSSSMESVSKSKANLEKICRTLEDQLSEARGKNEEIQRSLSELTTQKSRLQTEAGELSRQLEEKESIVSQLSRSKQAFTQQTEELKRQLEEENKAKNALAHALQSSRHDCDLLREQYEEEQEGKAELQRALSKANSEVAQWRTKYETDAIQRTEELEEAKKKLAQRLQDSEEQVEAVNAKCASLEKTKQRLQGEVEDLMVDVERANSLAAALDKKQRNFDKVLAEWKTKCEESQAELEASLKESRSLSTELFKLKNAYEEALDQLETVKRENKNLEQEIADLTEQIAENGKTIHELEKSRKQIELEKADIQLALEEAEAALEHEEAKILRIQLELTQVKSEIDRKIAEKDEEIEQLKRNYQRTVETMQSALDAEVRSRNEAIRLKKKMEGDLNEIEIQLSHANRQAAETLKHLRSVQGQLKDTQLHLDDALRGQEDLKEQLAIVERRANLLQAEVEELRATLEQTERARKLAEQELLDSNERVQLLHTQNTSLIHTKKKLETDLMQLQSEVEDASRDARNAEEKAKKAITDAAMMAEELKKEQDTSAHLERMKKNLEQTVKDLQHRLDEAEQLALKGGKKQIQKLETRIRELEFELEGEQKKNTESVKGLRKYERRVKELTYQSEEDRKNVLRLQDLVDKLQVKVKSYKRQAEEADEQANAHLTKFRKAQHELEEAEERADIAESQVNKLRAKTRDFTSSRMVVHESEE

SEQ ID NO: 642 - protein, 242 aa, human
MMMDLFETGSYFFYLDGENVTLQPLEVAEGSPLYPGSDGTLSPCQDQMPPEAGSDSSGEEHVLAPPGLQPPHCPGQCLIWACKTCKRKSAPTDRRKAATLRERRRLKKINEAFEALKRRTVANPNQRLPKVEILRSAISYIERLQDLLHRLDQQEKMQELGVDPFSYRPKQENLEGADFLRTCSSQWPSVSDHSRGLVITAKEGGASIDSSASSSLRCLSSIVDSISSEERKLPCVEEVVEK

SEQ ID NO: 643 - protein, 477 aa, human
MMEKNTSEGPACSPEETASESAKVPTAEPPGEVAVSESTREEQVPKPQAPAPQAPTASTATKPAPPSEDVPSAPLLLTLDDVSSSSVTVSWEPPERLGRLGLQGYVLELCREGASEWVPVSARPMMVTQQTVRNLALGDKFLLRVSAVSSAGAGPPAMLDQPIHIRENIEAPKIRVPRHLRQTYIRQVGETVNLQIPFQGKPKPQATWTHNGHALDSQRVSMRTGDQDSILFIRSAQRSDSGRYELTVRVEDLEAKAVIDILVIEKPGPPSSIRLLDVWGCNAALQWTPPQDTGNTELLGYMVQKADKKTGQWFTVLERYHPTTCTISDLIIGNSYSFRVFSENLCGLSTSATVTKELAHIQKADIAAKPKGFIERDFSEAPSFTQPLADHTSTPGYSTQLFCSVRASPKPKIIWMKNKMEIQGNPKYRALSEQGVCTLEIRKPSPFDSGVYTCKAINVLGEASVDCRLEVKASAAH

SEQ ID NO: 644 - protein, 482 aa, human
MEPWPLLLLFSLCSAGLVLGSEHETRLVAKLFKDYSSVVRPVEDHRQVVEVTVGLQLIQLINVDEVNQIVTTNVRLKQGDMVDLPRPSCVTLGVPLFSHLQNEQWVDYNLKWNPDDYGGVKKIHIPSEKIWRPDLVLYNNADGDFAIVKFTKVLLQYTGHITWTPPAIFKSYCEIIVTHFPFDEQNCSMKLGTWTYDGSVVAINPESDQPDLSNFMESGEWVIKESRGWKHSVTYSCCPDTPYLDITYHFVMQRLPLYFIVNVIIPCLLFSFLTGLVFYLPTDSGEKMTLSISVLLSLTVFLLVIVELIPSTSSAVPLIGKYMLFTMVFVIASIIITVIVINTHHRSPSTHVMPNWVRKVFIDTIPNIMFFSTMKRPSREKQDKKIFTEDIDISDISGKPGPPPMGFHSPLIKHPEVKSAIEGIKYIAETMKSDQESNNAAAEWKYVAMVMDHILLGVFMLVCIIGTLAVFAGRLIELNQQG

SEQ ID NO: 645 - protein, 377 aa, human; identical to SEQ ID NO: 335

SEQ ID NO: 646 - protein, 259 aa, human [sequence omitted]

SEQ ID NO: 647 - protein, 359 aa, human
MSYRRELEKYRDLDEDEILGALTEEELRTLENELDELDPDNALLPAGLRQKDQTTKAPTGPFKREELLDHLEKQAKEFKDREDLVPYTGEKRGKVWVPKQKPLDPVLESVTLEPELEEALANASDAELCDIAAILGMHTLMSNQQYYQALSSSSIMNKEGLNSVIKPTQYKPVPDEEPNSTDVEETLERIKNNDPKLEEVNLNNIRNIPIPTLKAYAEALKENSYVKKFSIVGTRSNDPVAYALAEMLKENKVLKTLNVESNFISGAGILRLVEALPYNTSLVEMKIDNQSQPLGNKVEMEIVSMLEKNATLLKFGYHFTQQGPRLRASNAMMNNNDLVRKRRLADLTGPIIPKCRSGV

SEQ ID NO: 648 - protein, 465 aa, human
QKEARSLSTELFKLKNAYEESLEHLETFKRENKNLQEEISDLTEQLGSSGKTIHELEKVRKQLEAEKMELQSALEEAEASLEHEEGKILRAQLEFNQIKAEIERKLAEKDEEMEQAKRNHLRVVDSLQTSLDAETRSRNEALRVKKKMEGDLNEMEIQLSHANRMAAEAQKQVKSLQSLLKDTQIQLDDAVRANDDLKENIAIVERRNNLLQAELEELRAVVEQTERSRKLAEQELIETSERVQLLHSQNTSLINQKKKMDADLSQLQTEVEEAVQECRNAEEKAKKAITDAAMMAEELKKEQDTSAHLERMKKNMEQTIKDLQHRLDEAEQIALKGGKKQLQKLEARVRELENELEAEQKRNAESVKGMRKSERRIKELTYQTEEDRKNLLRLQDLVDKLQLKVKAYKRQAEEAEEQANTNLSKFRKVQHELDEAEERADIAESQVNKLRAKSRDIGTKGLNEE

SEQ ID NO: 649 - protein, 317 aa, human
METNCRKLVSACVQLGVQPAAVECLFSKDSEIKKVEFTDSPESRKEAASSKFFPRQHPGANEKDKSQQGKNEDVGAEDPSKKKRQRRQRTHFTSQQLQELEATFQRNRYPDMSTREEIAVWTNLTEARVRVWFKNRRAKWRKRERNQQAELCKNGFGPQFNGLMQPYDDMYPGYSYNNWAAKGLTSASLSTKSFPFFNSMNVNPLSSQSMFSPPNSISSMSMSSSMVPSAVTGVPGSSLNSLNNLNNLSSPSLNSAVPTPACPYAPPTPPYVYRDTCNSSLASLRLKAKQHSSFGYASVQNPASNLSACQYAVDRPV

SEQ ID NO: 650 - protein, 1935 aa, human; identical to SEQ ID NO: 633

SEQ ID NO: 651 - protein, 195 aa, human
MAPKKPEPKKDDAKAAPKAAPAPAPPPEPERPKEVEFDASKIKIEFTPEQIEEFKEAFMLFDRTPKCEMKITYGQCGDVLRALGQNPTQAEVLRVLGKPRQEELNTKMMDFETFLPMLQHISKNKDTGTYEDFVEGLRVFDKEGNGTVMGAELRHVLATLGERLTEDEVEKLMAGQEDSNGCINYEAFVKHIMSS

SEQ ID NO: 652 - protein, 1935 aa, human; identical to SEQ ID NO: 633

SEQ ID NO: 653 - protein, 88 aa, human
MNMSKQPVSNVRAIQANINIPMGAFRPGAGQPPRRKECTPEVEEGVPPTSDEEKKPIPGAKKLPGPAVNLSEIQNIKSELKYVPKAEQ

SEQ ID NO: 654 - protein, 194 aa, human
MPNWGGGAKCGACEKTVYHAEEIQCNGRSFHKTCFHCMACRKALDSTTVAAHESEIYCKVCYGRRYGPKGIGYGQGAGCLSTDTGEHLGLQFQQSPKPARSVTTSNPSKFTAKFGESEKCPRCGKSVYAAEKVMGGGKPWHKTCFRCAICGKSLESTNVTDKDGELYCKVCYAKNFGPTGIGFGGLTQQVEKKE

SEQ ID NO: 655 - protein, 377 aa, human; identical to SEQ ID NO: 335

SEQ ID NO: 656 - protein, 259 aa, human [sequence omitted]

SEQ ID NO: 657 - protein, 341 aa, human
MAELQEVQITEEKPLLPGQTPEAAKTHSVETPYGSVTFTVYGTPKPKRPAILTYHDVGLNYKSCFQPLFQFEDMQEIIQNFVRVHVDAPGMEEGAPVFPLGYQYPSLDQLADMIPCVLQYLNFSTIIGVGVGAGAYILARYALNHPDTVEGLVLINIDPNAKGWMDWAAHKLTGLTSSIPEMILGHLFSQEELSGNSELIQKYRNIITHAPNLDNIELYWNSYNNRRDLNFERGGDITLRCPVMLVVGDQAPHEDAVMADSGGQPQLTQPGKLTEAFKYFLQGMGYMASSCMTRLSRSRTASLTSAASVDGNRSRSRTLSQSSESGTLSSGPPGHTMEVSC

SEQ ID NO: 658 - protein, 857 aa, human
VNFTVDQIRAIMDKKANIRNMSVIAHVDHGKSTLTDSLVCKAGIIASARAGETRFTDTRKDEQERCITIKSTAISLFYELSENDLNFIKQSKDGAGFLINLIDSPGHVDFSSEVTAALRVTDGALVVVDCVSGVCVQTETVLRQAIAERIKPVLMMNKMDRALLELQLEPEELYQTFQRIVENVNVIISTYGEGESGPMGNIMIDPVLGTVGFGSGLHGWAFTLKQFAEMYVAKFAAKGEGQLGPAERAKKVEDMMKKLWGDRYFDPANGKFSKSATSPEGKKLPRTFCQLILDPIFKVFDAIMNFKKEETAKLIEKLDIKLDSEDKDKEGKPLLKAVMRRWLPAGDALLQMITIHLPSPVTAQKYRCELLYEGPPDDEAAMGIKSCDPKGPLMMYISKMVPTSDKGRFYAFGRVFSGLVSTGLKVRIMGPNYTPGKKEDLYLKPIQRTILMMGRYVEPIEDVPCGNIVGLVGVDQFLVKTGTITTFEHAHNMRVMKFSVSPVVRVAVEAKNPADLPKLVEGLKRLAKSDPMVQCIIEESGEHIIAGAGELHLEICLKDLEEDHACIPIKKSDPVVSYRETVSEESNVLCLSKSPNKHNRLYMKARPFPDGLAEDIDKGEVSARQELKQRARYLAEKYEWDVAEARKIWCFGPDGTGPNILTDITKGVQYLNEIKDSVVAGFQWATKEGALCEENMRGVRFDVHDVTLHADAIHRGGGQIIPTARRCLYASVLTAQPRLMEPIYLVEIQCPEQVVGGIYGVLNRKRGHVFEESQVAGTPMFVVKAYLPVNESFGFTADLRSNTGGQAFPQCVFDHWQILPGDPFDNSSRPSQVVAETRKRKGLKEGIPALDNFLDKL

SEQ ID NO: 659 - protein, 1725 aa, human
PGKGTLEDQIIQANPALEAFGNAKTVRNDNSSRFGKFIRIHFGATGKLASADIETYLLEKSRVIFQLKAERDYHIFYQILSNKKPELLDMLLITNNPYDYAFISQGETTVASIDDAEELMATDNAFDVLGFTSEEKNSMYKLTGAIMHFGNMKFKLKQREEQAEPDGTEEADKSAYLMGLNSADLLKGLCHPRVKVGNEYVTKGQNVQQVIYATGALAKAVYERMFNWMVTRINATLETKQPRQYFIGVLDIAGFEIFDFNSFEQLCINFTNEKLQQFFNHHMFVLEQEEYKKEGIEWTFIDFGMDLQACIDLIEKPMGIMSILEEECMFPKATDMTFKAKLFDNHLGKSANFQKPRNIKGKPEAHFSLIHYAGIVDYNIIGWLQKNKDPLNETVVGLYQKSSLKLLSTLFANYAGADAPIEKGKGKAKKGSSFQTVSALHRENLNKLMTNLRSTHPHFVRCIIPNETKSPGVMDNPLVMHQLRCNGVLEGIRICRKGFPNRILYGDFRQRYRILNPAAIPEGQFIDSRKGAEKLLSSLDIDHNQYKFGHTKVFFKAGLLGLLEEMRDERLSRIITRIQAQSRGVLARMEYKKLLERRDSLLVIQWNIRAFMGVKNWPWMKLYFKIKPLLKSAEREKEMASMKEEFTRLKEALEKSEARRKELEEKMVSLLQEKNDLQLQVQAEQDNLADAEERCDQLIKNKIQLEAKVKEMNERLEDEEEMNAELTAKKRKLEDECSELKRDIDDLELTLAKVEKEKHATENKVKNLTEEMAGLDEIIAKLTKEKKALQEAHQQALDDLQAEEDKVNTLTKAKVKLEQQVDDLEGSLEQEKKVRMDLERAKRKLEGDLKLTQESIMDLENDKQQLDERLKKKDFELNALNARIEDEQALGSQLQKKLKELQARIEELEEELESERTARAKVEKLRSDLSRELEEISERLEEAGGATSVQIEMNKKREAEFQKMRRDLEEATLQHEATAAALRKKHADSVAELGEQIDNLQRVKQKLEKEKSEFKLELDDVTSNMEQIIKAKANLEKMCRTLEDQMNEHRSKAEETQRSVNDLTSQRAKLQTENGELSRQLDEKEALISQLTRGKLTYTQQLEDLKRQLEEEVKAKNALAHALQSARHDCDLLREQYEEETEAKAELQRVLSKANSEVAQWRTKYETDAIQRTEELEEAKKKLAQRLQEAEEAVEAVNAKCSSLEKTKHRLQNEIEDLMVDVERSNAAAAALDKKQRNFDKILAEWKQKYEESQSELESSQKEARSLSTELFKLKNAYEESLEHLETFKRENKNLQEEISDLTEQLGSSGKTIHELEKVRKQLEAEKMELQSALEEAEASLEHEEGKILRAQLEFNQIKAEIERKLAEKDEEMEQAKRNHLRVVDSLQTSLDAETRSRNEALRVKKKMEGDLNEMEIQLSHANRMAAEAQKQVKSLQSLLKDTQIQLDDAVRANDDLKENIAIVERRNNLLQAELEELRAVVEQTERSRKLAEQELIETSERVQLLHSQNTSLINQKKKMDADLSQLQTEVEEAVQECRNAEEKAKKAITDAAMMAEELKKEQDTSAHLERMKKNMEQTIKDLQHRLDEAEQIALKGGKKQLQKLEARVRELENELEAEQKRNAESVKGMRKSERRIKELTYQTEEDRKNLLRLQDLVDKLQLKVKAYKRQAEEAEEQANTNLSKFRKVQHELDEAEERADIAESQVNKLRAKSRDIGTKGLNEE

SEQ ID NO: 660 - protein, 2005 aa, human
MGDSEMAVFGAAAPYLRKSEKERLEAQTRPFDLKKDVFVPDDKQEFVKAKIVSREGGKVTAETEYGKTVTMGDSEMAVFGAAAPYLRKSEKERLEAQTRPFDLKKDVFVPDDKQEFVKAKIVSREGGKVTAETEYGKTVTVKEDQVMQQNPPKFDKIEDMAMLTFLHEPAVLYNLKDRYGSWMIYTYSGLFCVTVNPYKWLPVYTPEVVAAYRGKKRSEAPPHIFSISDNAYQYMLTDRENQSILITGESGAGKTVNTKRVIQYFAVIAAIGDRSKKDQSPGKGTLEDQIIQANPALEAFGNAKTVRNDNSSRFGKFIRIHFGATGKLASADIETYLLEKSRVIFQLKAERDYHIFYQILSNKKPELLDMLLITNNPYDYAFISQGETTVASIDDAEELMATDNAFDVLGFTSEEKNSMYKLTGAIMHFGNMKFKLKQREEQAEPDGTEEADKSAYLMGLNSADLLKGLCHPRVKVGNEYVTKGQNVQQVIYATGALAKAVYERMFNWMVTRINATLETKQPRQYFIGVLDIAGFEIFDFNSFEQLCINFTNEKLQQFFNHHMFVLEQEEYKKEGIEWTFIDFGMDLQACIDLIEKPMGIMSILEEECMFPKATDMTFKAKLFDNHLGKSANFQKPRNIKGKPEAHFSLIHYAGIVDYNIIGWLQKNKDPLNETVVGLYQKSSLKLLSTLFANYAGADAPIEKGKGKAKKGSSFQTVSALHRENLNKLMTNLRSTHPHFVRCIIPNETKSPGVMDNPLVMHQLRCNGVLEGIRICRKGFPNRILYGDFRQRYRILNPAAIPEGQFIDSRKGAEKLLSSLDIDHNQYKFGHTKVFFKAGLLGLLEEMRDERLSRIITRIQAQSRGVLARMEYKKLLERRDSLLVIQWNIRAFMGVKNWPWMKLYFKIKPLLKSAEREKEMASMKEEFTRLKEALEKSEARRKELEEKMVSLLQEKNDLQLQVQAEQDNLADAEERCDQLIKNKIQLEAKVKEMNERLEDEEEMNAELTAKKRKLEDECSELKRDIDDLELTLAKVEKEKHATENKVKNLTEEMAGLDEIIAKLTKEKKALQEAHQQALDDLQAEEDKVNTLTKAKVKLEQQVDDLEGSLEQEKKVRMDLERAKRKLEGDLKLTQESIMDLENDKQQLDERLKKKDFELNALNARIEDEQALGSQLQKKLKELQARIEELEEELESERTARAKVEKLRSDLSRELEEISERLEEAGGATSVQIEMNKKREAEFQKMRRDLEEATLQHEATAAALRKKHADSVAELGEQIDNLQRVKQKLEKEKSEFKLELDDVTSNMEQIIKAKANLEKMCRTLEDQMNEHRSKAEETQRSVNDLTSQRAKLQTENGELSRQLDEKEALISQLTRGKLTYTQQLEDLKRQLEEEVKAKNALAHALQSARHDCDLLREQYEEETEAKAELQRVLSKANSEVAQWRTKYETDAIQRTEELEEAKKKLAQRLQEAEEAVEAVNAKCSSLEKTKHRLQNEIEDLMVDVERSNAAAAALDKKQRNFDKILAEWKQKYEESQSELESSQKEARSLSTELFKLKNAYEESLEHLETFKRENKNLQEEISDLTEQLGSSGKTIHELEKVRKQLEAEKMELQSALEEAEASLEHEEGKILRAQLEFNQIKAEIERKLAEKDEEMEQAKRNHLRVVDSLQTSLDAETRSRNEALRVKKKMEGDLNEMEIQLSHANRMAAEAQKQVKSLQSLLKDTQIQLDDAVRANDDLKENIAIVERRNNLLQAELEELRAVVEQTERSRKLAEQELIETSERVQLLHSQNTSLINQKKKMDADLSQLQTEVEEAVQECRNAEEKAKKAITDAAMMAEELKKEQDTSAHLERMKKNMEQTIKDLQHRLDEAEQIALKGGKKQLQKLEARVRELENELEAEQKRNAESVKGMRKSERRIKELTYQTEEDRKNLLRLQDLVDKLQLKVKAYKRQAEEAEEQANTNLSKFRKVQHELDEAEERADIAESQVNKLRAKSRDIGTKGLNEE

SEQ ID NO: 661 - protein, 343 aa, human
MAQKGVLGPGQLGAVAILLYLGLLRSGTGAEGAEAPCGVAPQARITGGSSAVAGQWPWQVSITYEGVHVCGGSLVSEQWVLSAAHCFPSEHHKEAYEVKLGAHQLDSYSEDAKVSTLKDIIPHPSYLQEGSQGDIALLQLSRPITFSRYIRPICLPAANASFPNGLHCTVTGWGHVAPSVSLLTPKPLQQLEVPLISRETCNCLYNIDAKPEEPHFVQEDMVCAGYVEGGKDACQGDSGGPLSCPVEGLWYLTGIVSWGDACGARNRPGVYTLASSYASWIQSKVTELQPRVVPQTQESQPDSNLCGSHLAFSSAPAQGLLRPILFLPLGLALGLLSPWLSEH

SEQ ID NO: 662 - protein, 1795 aa, human
AYRGKKRSEAPPHIFSISDNAYQYMLTDRENQSILITGESGAGKTVNTKRVIQYFAVIAAIGDRSKKDQSPGKGTLEDQIIQANPALEAFGNAKTVRNDNSSRFGKFIRIHFGATGKLASADIETYLLEKSRVIFQLKAERDYHIFYQILSNKKPELLDMLLITNNPYDYAFISQGETTVASIDDAEELMATDNAFDVLGFTSEEKNSMYKLTGAIMHFGNMKFKLKQREEQAEPDGTEEADKSAYLMGLNSADLLKGLCHPRVKVGNEYVTKGQNVQQVIYATGALAKAVYERMFNWMVTRINATLETKQPRQYFIGVLDIAGFEIFDFNSFEQLCINFTNEKLQQFFNHHMFVLEQEEYKKEGIEWTFIDFGMDLQACIDLIEKPMGIMSILEEECMFPKATDMTFKAKLFDNHLGKSANFQKPRNIKGKPEAHFSLIHYAGIVDYNIIGWLQKNKDPLNETVVGLYQKSSLKLLSTLFANYAGADAPIEKGKGKAKKGSSFQTVSALHRENLNKLMTNLRSTHPHFVRCIIPNETKSPGVMDNPLVMHQLRCNGVLEGIRICRKGFPNRILYGDFRQRYRILNPAAIPEGQFIDSRKGAEKLLSSLDIDHNQYKFGHTKVFFKAGLLGLLEEMRDERLSRIITRIQAQSRGVLARMEYKKLLERRDSLLVIQWNIRAFMGVKNWPWMKLYFKIKPLLKSAEREKEMASMKEEFTRLKEALEKSEARRKELEEKMVSLLQEKNDLQLQVQAEQDNLADAEERCDQLIKNKIQLEAKVKEMNERLEDEEEMNAELTAKKRKLEDECSELKRDIDDLELTLAKVEKEKHATENKVKNLTEEMAGLDEIIAKLTKEKKALQEAHQQALDDLQAEEDKVNTLTKAKVKLEQQVDDLEGSLEQEKKVRMDLERAKRKLEGDLKLTQESIMDLENDKQQLDERLKKKDFELNALNARIEDEQALGSQLQKKLKELQARIEELEEELESERTARAKVEKLRSDLSRELEEISERLEEAGGATSVQIEMNKKREAEFQKMRRDLEEATLQHEATAAALRKKHADSVAELGEQIDNLQRVKQKLEKEKSEFKLELDDVTSNMEQIIKAKANLEKMCRTLEDQMNEHRSKAEETQRSVNDLTSQRAKLQTENGELSRQLDEKEALISQLTRGKLTYTQQLEDLKRQLEEEVKAKNALAHALQSARHDCDLLREQYEEETEAKAELQRVLSKANSEVAQWRTKYETDAIQRTEELEEAKKKLAQRLQEAEEAVEAVNAKCSSLEKTKHRLQNEIEDLMVDVERSNAAAAALDKKQRNFDKILAEWKQKYEESQSELESSQKEARSLSTELFKLKNAYEESLEHLETFKRENKNLQEEISDLTEQLGSSGKTIHELEKVRKQLEAEKMELQSALEEAEASLEHEEGKILRAQLEFNQIKAEIERKLAEKDEEMEQAKRNHLRVVDSLQTSLDAETRSRNEALRVKKKMEGDLNEMEIQLSHANRMAAEAQKQVKSLQSLLKDTQIQLDDAVRANDDLKENIAIVERRNNLLQAELEELRAVVEQTERSRKLAEQELIETSERVQLLHSQNTSLINQKKKMDADLSQLQTEVEEAVQECRNAEEKAKKAITDAAMMAEELKKEQDTSAHLERMKKNMEQTIKDLQHRLDEAEQIALKGGKKQLQKLEARVRELENELEAEQKRNAESVKGMRKSERRIKELTYQTEEDRKNLLRLQDLVDKLQLKVKAYKRQAEEAEEQANTNLSKFRKVQHELDEAEERADIAESQVNKLRAKSRDIGTKGLNEE

SEQ ID NO: 663 - protein, 343 aa, human; identical to SEQ ID NO: 661

SEQ ID NO: 664 - protein, 158 aa, human
MMQKLLKCSRLVLALALILVLESSVQGYPTQRARYQWVRCNPDSNSANCLEEKGPMFELLPGESNKIPRLRTDLFPKTRIQDLNRIFPLSEDYSGSGFGSGSGSGSGSGSGFLTEMEQDYQLVDESDAFHDNLRSLDRNLPSDSQDLGQHGLEEDFML

SEQ ID NO: 665 - protein, 222 aa, human
MSQTKMLKVRVTLFCILAGIVLAMTAVVTDHWAVLSPHMEHHNTTCEAAHFGLWRICTKRIPMDDSKTCGPITLPGEKNCSYFRHFNPGESSEIFEFTTQKEYSISAAAIAIFSLGFIILGSLCVLLSLGKKRDYLLRPASMFYAFAGLCILVSVEVMRQSVKRMIDSEDTVWIEYYYSWSFACACAAFILLFLGGLALLLFSLPRMPRNPWESCMDAEPEH

SEQ ID NO: 666 - protein, 245 aa, human
MSKVVHMDRWSVEVIPQQTEEKSDPVPFQIINNYFSIGVDASIAHRFHIMREKYPEKFNSRMKNKLWYFEFATSESIFSTCKKLEESLTVEICGKPLDLSNLSLEGIAVLNIPSMHGGSNLWGDTRRPHGDIYGINQALGATAKVITDPDILKTCVPDLSDKRLEVVGLEGAIEMGQIYTKLKNAGRRLAKCSEITFHTTKTLPMQIDVEPWMQTPCTIKITHKNQMPMLMGPPPRSTNFFGFLS

SEQ ID NO: 667 - protein, 1165 aa, human
GLLEEMRDERLSRIITRIQAQSRGVLARMEYKKLLERRDSLLVIQWNIRAFMGVKNWPWMKLYFKIKPLLKSAEREKEMASMKEEFTRLKEALEKSEARRKELEEKMVSLLQEKNDLQLQVQAEQDNLADAEERCDQLIKNKIQLEAKVKEMNERLEDEEEMNAELTAKKRKLEDECSELKRDIDDLELTLAKVEKEKHATENKVKNLTEEMAGLDEIIAKLTKEKKALQEAHQQALDDLQAEEDKVNTLTKAKVKLEQQVDDLEGSLEQEKKVRMDLERAKRKLEGDLKLTQESIMDLENDKQQLDERLKKKDFELNALNARIEDEQALGSQLQKKLKELQARIEELEEELESERTARAKVEKLRSDLSRELEEISERLEEAGGATSVQIEMNKKREAEFQKMRRDLEEATLQHEATAAALRKKHADSVAELGEQIDNLQRVKQKLEKEKSEFKLELDDVTSNMEQIIKAKANLEKMCRTLEDQMNEHRSKAEETQRSVNDLTSQRAKLQTENGELSRQLDEKEALISQLTRGKLTYTQQLEDLKRQLEEEVKAKNALAHALQSARHDCDLLREQYEEETEAKAELQRVLSKANSEVAQWRTKYETDAIQRTEELEEAKKKLAQRLQEAEEAVEAVNAKCSSLEKTKHRLQNEIEDLMVDVERSNAAAAALDKKQRNFDKILAEWKQKYEESQSELESSQKEARSLSTELFKLKNAYEESLEHLETFKRENKNLQEEISDLTEQLGSSGKTIHELEKVRKQLEAEKMELQSALEEAEASLEHEEGKILRAQLEFNQIKAEIERKLAEKDEEMEQAKRNHLRVVDSLQTSLDAETRSRNEALRVKKKMEGDLNEMEIQLSHANRMAAEAQKQVKSLQSLLKDTQIQLDDAVRANDDLKENIAIVERRNNLLQAELEELRAVVEQTERSRKLAEQELIETSERVQLLHSQNTSLINQKKKMDADLSQLQTEVEEAVQECRNAEEKAKKAITDAAMMAEELKKEQDTSAHLERMKKNMEQTIKDLQHRLDEAEQIALKGGKKQLQKLEARVRELENELEAEQKRNAESVKGMRKSERRIKELTYQTEEDRKNLLRLQDLVDKLQLKVKAYKRQAEEAEEQANTNLSKFRKVQHELDEAEERADIAESQVNKLRAKSRDIGTKGLNEE

SEQ ID NO: 668 - protein, 1655 aa, human
RDYHIFYQILSNKKPELLDMLLITNNPYDYAFISQGETTVASIDDAEELMATDNAFDVLGFTSEEKNSMYKLTGAIMHFGNMKFKLKQREEQAEPDGTEEADKSAYLMGLNSADLLKGLCHPRVKVGNEYVTKGQNVQQVIYATGALAKAVYERMFNWMVTRINATLETKQPRQYFIGVLDIAGFEIFDFNSFEQLCINFTNEKLQQFFNHHMFVLEQEEYKKEGIEWTFIDFGMDLQACIDLIEKPMGIMSILEEECMFPKATDMTFKAKLFDNHLGKSANFQKPRNIKGKPEAHFSLIHYAGIVDYNIIGWLQKNKDPLNETVVGLYQKSSLKLLSTLFANYAGADAPIEKGKGKAKKGSSFQTVSALHRENLNKLMTNLRSTHPHFVRCIIPNETKSPGVMDNPLVMHQLRCNGVLEGIRICRKGFPNRILYGDFRQRYRILNPAAIPEGQFIDSRKGAEKLLSSLDIDHNQYKFGHTKVFFKAGLLGLLEEMRDERLSRIITRIQAQSRGVLARMEYKKLLERRDSLLVIQWNIRAFMGVKNWPWMKLYFKIKPLLKSAEREKEMASMKEEFTRLKEALEKSEARRKELEEKMVSLLQEKNDLQLQVQAEQDNLADAEERCDQLIKNKIQLEAKVKEMNERLEDEEEMNAELTAKKRKLEDECSELKRDIDDLELTLAKVEKEKHATENKVKNLTEEMAGLDEIIAKLTKEKKALQEAHQQALDDLQAEEDKVNTLTKAKVKLEQQVDDLEGSLEQEKKVRMDLERAKRKLEGDLKLTQESIMDLENDKQQLDERLKKKDFELNALNARIEDEQALGSQLQKKLKELQARIEELEEELESERTARAKVEKLRSDLSRELEEISERLEEAGGATSVQIEMNKKREAEFQKMRRDLEEATLQHEATAAALRKKHADSVAELGEQIDNLQRVKQKLEKEKSEFKLELDDVTSNMEQIIKAKANLEKMCRTLEDQMNEHRSKAEETQRSVNDLTSQRAKLQTENGELSRQLDEKEALISQLTRGKLTYTQQLEDLKRQLEEEVKAKNALAHALQSARHDCDLLREQYEEETEAKAELQRVLSKANSEVAQWRTKYETDAIQRTEELEEAKKKLAQRLQEAEEAVEAVNAKCSSLEKTKHRLQNEIEDLMVDVERSNAAAAALDKKQRNFDKILAEWKQKYEESQSELESSQKEARSLSTELFKLKNAYEESLEHLETFKRENKNLQEEISDLTEQLGSSGKTIHELEKVRKQLEAEKMELQSALEEAEASLEHEEGKILRAQLEFNQIKAEIERKLAEKDEEMEQAKRNHLRVVDSLQTSLDAETRSRNEALRVKKKMEGDLNEMEIQLSHANRMAAEAQKQVKSLQSLLKDTQIQLDDAVRANDDLKENIAIVERRNNLLQAELEELRAVVEQTERSRKLAEQELIETSERVQLLHSQNTSLINQKKKMDADLSQLQTEVEEAVQECRNAEEKAKKAITDAAMMAEELKKEQDTSAHLERMKKNMEQTIKDLQHRLDEAEQIALKGGKKQLQKLEARVRELENELEAEQKRNAESVKGMRKSERRIKELTYQTEEDRKNLLRLQDLVDKLQLKVKAYKRQAEEAEEQANTNLSKFRKVQHELDEAEERADIAESQVNKLRAKSRDIGTKGLNEE

SEQ ID NO: 669 - protein, 166 aa, human
MASGVAVSDGVIKVFNDMKVRKSSTPEEVKKRKKAVLFCLSEDKKNIILEEGKEILVGDVGQTVDDPYATFVKMLPDKDCRYALYDATYETKESKKEDLVFIFWAPESAPLKSKMIYASSKDAIKKKLTGIKHELQANCYEEVKDRCTLAEKLGGSAVISLEGKPL

SEQ ID NO: 670 - protein, 1940 aa, human; identical to SEQ ID NO: 641

SEQ ID NO: 671 - protein, 1305 aa, human
IEKGKGKAKKGSSFQTVSALHRENLNKLMTNLRSTHPHFVRCIIPNETKSPGVMDNPLVMHQLRCNGVLEGIRICRKGFPNRILYGDFRQRYRILNPAAIPEGQFIDSRKGAEKLLSSLDIDHNQYKFGHTKVFFKAGLLGLLEEMRDERLSRIITRIQAQSRGVLARMEYKKLLERRDSLLVIQWNIRAFMGVKNWPWMKLYFKIKPLLKSAEREKEMASMKEEFTRLKEALEKSEARRKELEEKMVSLLQEKNDLQLQVQAEQDNLADAEERCDQLIKNKIQLEAKVKEMNERLEDEEEMNAELTAKKRKLEDECSELKRDIDDLELTLAKVEKEKHATENKVKNLTEEMAGLDEIIAKLTKEKKALQEAHQQALDDLQAEEDKVNTLTKAKVKLEQQVDDLEGSLEQEKKVRMDLERAKRKLEGDLKLTQESIMDLENDKQQLDERLKKKDFELNALNARIEDEQALGSQLQKKLKELQARIEELEEELESERTARAKVEKLRSDLSRELEEISERLEEAGGATSVQIEMNKKREAEFQKMRRDLEEATLQHEATAAALRKKHADSVAELGEQIDNLQRVKQKLEKEKSEFKLELDDVTSNMEQIIKAKANLEKMCRTLEDQMNEHRSKAEETQRSVNDLTSQRAKLQTENGELSRQLDEKEALISQLTRGKLTYTQQLEDLKRQLEEEVKAKNALAHALQSARHDCDLLREQYEEETEAKAELQRVLSKANSEVAQWRTKYETDAIQRTEELEEAKKKLAQRLQEAEEAVEAVNAKCSSLEKTKHRLQNEIEDLMVDVERSNAAAAALDKKQRNFDKILAEWKQKYEESQSELESSQKEARSLSTELFKLKNAYEESLEHLETFKRENKNLQEEISDLTEQLGSSGKTIHELEKVRKQLEAEKMELQSALEEAEASLEHEEGKILRAQLEFNQIKAEIERKLAEKDEEMEQAKRNHLRVVDSLQTSLDAETRSRNEALRVKKKMEGDLNEMEIQLSHANRMAAEAQKQVKSLQSLLKDTQIQLDDAVRANDDLKENIAIVERRNNLLQAELEELRAVVEQTERSRKLAEQELIETSERVQLLHSQNTSLINQKKKMDADLSQLQTEVEEAVQECRNAEEKAKKAITDAAMMAEELKKEQDTSAHLERMKKNMEQTIKDLQHRLDEAEQIALKGGKKQLQKLEARVRELENELEAEQKRNAESVKGMRKSERRIKELTYQTEEDRKNLLRLQDLVDKLQLKVKAYKRQAEEAEEQANTNLSKFRKVQHELDEAEERADIAESQVNKLRAKSRDIGTKGLNEE

SEQ ID NO: 672 - protein, 377 aa, human; identical to SEQ ID NO: 350

SEQ ID NO: 673 - protein, 187 aa, human
MPEVERKPKITASRKLLLKSLMLAKAKECWEQEHEEREAEKVRYLAERIPTLQTRGLSLSALQDLCRELHAKVEVVDEERYDIEAKCLHNTREIKDLKLKVMDLRGKFKRPPLRRVRVSADAMLRALLGSKHKVSMDLRANLKSVKKEDTEKERPVEVGDWRKNVEAMSGMEGRKKMFDAAKSPTSQ

SEQ ID NO: 674 - protein, 562 aa, human
MVKIVTVKTQAYQDQKPGTSGLRKRVKVFQSSANYAENFIQSIISTVEPAQRQEATLVVGGDGRFYMKEAIQLIARIAAANGIGRLVIGQNGILSTPAVSCIIRKIKAIGGIILTASHNPGGPNGDFGIKFNISNGGPAPEAITDKIFQISKTIEEYAVCPDLKVDLGVLGKQQFDLENKFKPFTVEIVDSVEAYATMLRSIFDFSALKELLSGPNRLKIRIDAMHGVVGPYVKKILCEELGAPANSAVNCVPLEDFGGHHPDPNLTYAADLVETMKSGEHDFGAAFDGDGDRNMILGKHGFFVNPSDSVAVIAANIFSIPYFQQTGVRGFARSMPTSGALDRVASATKIALYETPTGWKFFGNLMDASKLSLCGEESFGTGSDHIREKDGLWAVLAWLSILATRKQSVEDILKDHWQKYGRNFFTRYDYEEVEAEGANKMMKDLEALMFDRSFVGKQFSANDKVYTVEKADNFEYSDPVDGSISRNQGLRLIFTDGSRIVFRLSGTGSAGATIRLYIDSYEKDVAKINQDPQVMLAPLISIALKVSQLQERTGRTAPTVIT

SEQ ID NO: 675 - protein, 150 aa, human
MSFSADQIAEFKEAFLLFDRTGDSKITLSQVGDVLRALGTNPTNAEVRKVLGNPSNEELNAKKIEFEQFLPMMQAISNNKDQATYEDFVEGLRVFDKEGNGTVMGAELRHVLATLGEKMKEEEVEALMAGQEDSNGCINYEAFVKHIMSI

SEQ ID NO: 676 - protein, 205 aa, human
MEFLWAPLLGLCCSLAAADRHTVFWNSSNPKFRNEDYTIHVQLNDYVDIICPHYEDHSVADAAMEQYILYLVEHEEYQLCQPQSKDQVRWQCNRPSAKHGPEKLSEKFQRFTPFTLGKEFKEGHSYYYISKPIHQHEDRCLRLKVTVSGKITHSPQAHVNPQEKRLAADDPEVRVLHSIGHSAAPRLFPLAWTVLLLPLLLLQTP

SEQ ID NO: 677 - protein, 150 aa, human; identical to SEQ ID NO: 675

SEQ ID NO: 678 - protein, 284 aa, human
MDAIKKKMQMLKLDKENAIDRAEQAEADKKQAEDRCKQLEEEQQALQKKLKGTEDEVEKYSESVKEAQEKLEQAEKKATDAEADVASLNRRIQLVEEELDRAQERLATALQKLEEAEKAADESERGMKVIENRAMKDEEKMELQEMQLKEAKHIAEDSDRKYEEVARKLVILEGELERSEERAEVAESKCGDLEEELKIVTNNLKSLEAQADKYSTKEDKYEEEIKLLEEKLKEAETRAEFAERSVAKLEKTIDDLEDEVYAQKMKYKAISEELDNALNDITSL

SEQ ID NO: 679 - protein, 793 aa, human
MDSWFILVLLGSGLICVSANNATTVAPSVGITRLINSSTAEPVKEEAKTSNPTSSLTSLSVAPTFSPNITLGPTYLTTVNSSDSDNGTTRTASTNSIGITISPNGTWLPDNQFTDARTEPWEGNSSTAATTPETFPPSDETPIIAVMVALSSLLVIVFIIIVLYMLRFKKYKQAGSHSNSFRLSNGRTEDVEPQSVPLLARSPSTNRKYPPLPVDKLEEEINRRMADDNKLFREEFNALPACPIQATCEAASKEENKEKNRYVNILPYDHSRVHLTPVEGVPDSDYINASFINGYQEKNKFIAAQGPKEETVNDFWRMIWEQNTATIVMVTNLKERKECKCAQYWPDQGCWTYGNIRVSVEDVTVLVDYTVRKFCIQQVGDMTNRKPQRLITQFHFTSWPDFGVPFTPIGMLKFLKKVKACNPQYAGAIVVHCSAGVGRTGTFVVIDAMLDMMHTERKVDVYGFVSRIRAQRCQMVQTDMQYVFIYQALLEHYLYGDTELEVTSLETHLQKIYNKIPGTSNNGLEEEFKKLTSIKIQNDKMRTGNLPANMKKNRVLQIIPYEFNRVIIPVKRGEENTDYVNASFIDGYRQKDSYIASQGPLLHTIEDFWRMIWEWKSCSIVMLTELEERGQEKCAQYWPSDGLVSYGDITVELKKEEECESYTVRDLLVTNTRENKSRQIRQFHFHGWPEVGIPSDGKGMISIIAAVQKQQQQSGNHPITVHCSAGAGRTGTFCALSTVLERVKAEGILDVFQTVKSLRLQRPHMVQTLEQYEFCYKVVQEYIDAFSDYANFK

SEQ ID NO: 680 - protein, 349 aa, human
TDQAFVTLTTNDAYAKGALVLGSSLKQHRTTRRLVVLATPQVSDSMRKVLETVFDEVIMVDVLDSGDSAHLTLMKRPELGVTLTKLHCWSLTQYSKCVFMDADTLVLANIDDLFDREELSAAPDPGWPDCFNSGVFVYQPSVETYNQLLHLASEQGSFDGGDQGILNTFFSSWATTDIRKHLPFIYNLSSISIYSYLPAFKVFGASAKVVHFLGRVKPWNYTYDPKTKSVKSEAHDPNMTHPEFLILWWNIFTTNVLPLLQQFGLVKDTCSYVNVLSDLVYTLAFSCGFCRKEDVSGAISHLSLGEIPAMAQPFVSSEERKERWEQGQADYMGADSFDNIKRKLDTYLQ

SEQ ID NO: 681 - protein, 349 aa, human; identical to SEQ ID NO: 680

SEQ ID NO: 682 - protein, 1940 aa, human
MSSDTEMEVFGIAAPFLRKSEKERIEAQNQPFDAKTYCFVVDSKEEYAKGKIKSSQDGKVTVETEDNRTLVVKPEDVYAMNPPKFDRIEDMAMLTHLNEPAVLYNLKDRYTSWMIYTYSGLFCVTVNPYKWLPVYNPEVVEGYRGKKRQEAPPHIFSISDNAYQFMLTDRENQSILITGESGAGKTVNTKRVIQYFATIAATGDLAKKKDSKMKGTLEDQIISANPLLEAFGNAKTVRNDNSSRFGKFIRIHFGTTGKLASADIETYLLEKSRVTFQLKAERSYHIFYQILSNKKPELIELLLITTNPYDYPFISQGEILVASIDDREELLATDSAIDILGFTPEEKSGLYKLTGAVMHYGNMKFKQKQREEQAEPDGTEVADKTAYLMGLNSSDLLKALCFPRVKVGNEYVTKGQTVDQVHHAVNALSKSVYEKLFLWMVTRINQQLDTKLPRQHFIGVLDIAGFEIFEYNSLEQLCINFTNEKLQQFFNHHMFVLEQEEYKKEGIEWTFIDFGMDLAACIELIEKPMGIFSILEEECMFPKATDTSFKNKLYDQHLGKSNNFQKPKVVKGRAEAHFSLIHYAGTVDYSVSGWLEKNKDPLNETVVGLYQKSSNRLLAHLYATFATADADSGKKKVAKKKGSSFQTVSALFRENLNKLMSNLRTTHPHFVRCIIPNETKTPGAMEHSLVLHQLRCNGVLEGIRICRKGFPNRILYGDFKQRYRVLNASAILEGQFIDSKKACEKLLASIDIDHTQYKFGHTKVFFKAGLLGTLEEMRDDRLAKLITRTQAVCRGFLMRVEFQKMVQRRESIFCIQYNIRSFMNVKHWPWMKLFFKIKPLLKSAETEKEMATMKEEFQKTKDELAKSEAKRKELEEKLVTLVQEKNDLQLQVQAESENLLDAEERCDQLIKAKFQLEAKIKEVTERAEDEEEINAELTAKKRKLEDECSELKKDIDDLELTLAKVEKEKHATENKVKNLTEELSGLDETIAKLTREKKALQEAHQQALDDLQAEEDKVNSLNKTKSKLEQQVEDLESSLEQEKKLRVDLERNKRKLEGDLKLAQESILDLENDKQQLDERLKKKDFEYCQLQSKVEDEQTLGLQFQKKIKELQARIEELEEEIEAERATRAKTEKQRSDYARELEELSERLEEAGGVTSTQIELNKKREAEFLKLRRDLEEATLQHEAMVATLRKKHADSVAELGEQIDNLQRVKQKLEKEKSEFKLEIDDLSSSMESVSKSKANLEKICRTLEDQLSEARGKNEEIQRSLSELTTQKSRLQTEAGELSRQLEEKESIVSQLSRSKQAFTQQTEELKRQLEEENKAKNALAHALQSSRHDCDLLREQYEEEQEGKAELQRALSKANSEVAQWRTKYETDAIQRTEELEEAQEKLAQRLQDSEEQVEAVNAKCASLEKTKQRLQGEVEDLMVDVERANSLAAALDKKQRNFDKVLAEWKTKCEESQAELEASLKESRSLSTELFKLKNAYEEALDQLETVKRENKNLEQEIADLTEQIAENGKTIHELEKSRKQIELEKADIQLALEEAEAALEHEEAKILRIQLELTQVKSEIDRKIAEKDEEIEQLKRNYQRTVETMQSALDAEVRSRNEAIRLKKKMEGDLNEIEIQLSHANRQAAETLKHLRSVQGQLKDTQLHLDDALRGQEDLKEQLAIVERRANLLQAEVEELRATLEQTERARKLAEQELLDSNERVQLLHTQNTSLIHTKKKLETDLMQLQSEVEDASRDARNAEEKAKKAITDAAMMAEELKKEQDTSAHLERMKKNLEQTVKDLQHRLDEAEQLALKGGKKQIQKLETRIRELEFELEGEQKKNTESVKGLRKYERRVKELTYQSEEDRKNVLRLQDLVDKLQVKVKSYKRQAEEADEQANAHLTKFRKAQHELEEAEERADIAESQVNKLRAKTRDFTSSRMVVHESEE

SEQ ID NO: 683 - protein, 821 aa, human
MPTVISASVAPRTAAEPRSPGPVPHPAQSKATEAGGGNPSGIYSAIISRNFPIIGVKEKTFEQLHKKCLEKKVLYVDPEFPPDETSLFYSQKFPIQFVWKRPPEICENPRFIIDGANRTDICQGELGDCWFLAAIACLTLNQHLLFRVIPHDQSFIENYAGIFHFQFWRYGEWVDVVIDDCLPTYNNQLVFTKSNHRNEFWSALLEKAYAKLHGSYEALKGGNTTEAMEDFTGGVAEFFEIRDAPSDMYKIMKKAIERGSLMGCSIDDGTNMTYGTSPSGLNMGELIARMVRNMDNSLLQDSDLDPRGSDERPTRTIIPVQYETRMACGLVRGHAYSVTGLDEVPFKGEKVKLVRLRNPWGQVEWNGSWSDRWKDWSFVDKDEKARLQHQVTEDGEFWMSYEDFIYHFTKLEICNLTADALQSDKLQTWTVSVNEGRWVRGCSAGGCRNFPDTFWTNPQYRLKLLEEDDDPDDSEVICSFLVALMQKNRRKDRKLGASLFTIGFAIYEVPKEMHGNKQHLQKDFFLYNASKARSKTYINMREVSQRFRLPPSEYVIVPSTYEPHQEGEFILRVFSEKRNLSEEVENTISVDRPVKKKKTKPIIFVSDRANSNKELGVDQESEEGKGKTSPDKQKQSPQPQPGSSDQESEEQQQFRNIFKQIAGDDMEICADELKKVLNTVVNKHKDLKTHGFTLESCRSMIALMDTDGSGKLNLQEFHHLWNKIKAWQKIFKHYDTDQSGTINSYEMRNAVNDAGFHLNNQLYDIITMRYADKHMNIDFDSFICCFVRLEGMFRAFHAFDKDGDGIIKLNVLEWLQLTMYA

SEQ ID NO: 684 - protein, 839 aa, human
MSAGDGLRRGKSARCGLTFSVGRFFRWMVDTRISVRIHEYAAISLTACMENLVEEIRARVMASHSPDGGGAGGGEVSAEALEMVINNDAELWGVLQPYEHLICGKNANGVLSLPAYFSPYNGGSLGHDERADAYAQLELRTLEQSLLATCVGSISELSDLVSRAMHHMQGRHPLCPGASPARQARQPPQPITWSPDALHTLYYFLRCPQMESMENPNLDPPRMTLNNERPFMLLPPLMEWMRVAITYAEHRRSLTVDSGDIRQAARLLLPGLDCEPRQLKPEHCFSSFRRLDARAATEKFNQDLGFRMLNCGRTDLINQAIEALGPDGVNTMDDQGMTPLMYACAAGDEAMVQMLIDAGANLDIQVPSNSPRHPSIHPDSRHWTSLTFAVLHGHISVVQLLLDAGAHVEGSAVNGGEDSYAETPLQLASAAGNYELVSLLLSRGADPLLSMLEAHGMGSSLHEDMNCFSHSAAHGHRNVLRKLLTQPQQAKADVLSLEEILAEGVEESDASSQGSGSEGPVRLSRTRTKALQEAMYYSAEHGYVDITMELRALGVPWKLHIWIESLRTSFSQSRYSVVQSLLRDFSSIREEEYNEELVTEGLQLMFDILKTSKNDSVIQQLATIFTHCYGSSPIPSIPEIRKTLPARLDPHFLNNKEMSDVTFLVEGKLFYAHKVLLVTASNRFKTLMTNKSEQDGDSSKTIEISDMKYHIFQMMMQYLYYGGTESMEIPTTDILELLSAASLFQLDALQRHCEILCSQTLSMESAVNTYKYAKIHNAPELALFCEGFFLKHMKALLEQDAFRQLIYGRSSKVQGLDPLQDLQNTLAERVHSVYITSRV

SEQ ID NO: 685 - protein, 461 aa, human
MLELRHRGSCPGPREAVSPPHREGEAAGGDHETESTSDKETDIDDRYGDLDSRTDSDIPEIPPSSDRTPEILKKALSGLSSRWKNWWIRGILTLTMISLFFLIIYMGSFMLMLLVLGIQVKCFHEIITIGYRVYHSYDLPWFRTLSWYFLLCVNYFFYGETVADYFATFVQREEQLQFLIRYHRFISFALYLAGFCMFVLSLVKKHYRLQFYMFAWTHVTLLITVTQSHLVIQNLFEGMIWFLVPISSVICNDITAYLFGFFFGRTPLIKLSPKKTWEGFIGGFFSTVVFGFIAAYVLSKYQYFVCPVEYRSDVNSFVTECEPSELFQLQTYSLPPFLKAVLRQERVSLYPFQIHSIALSTFASLIGPFGGFFASGFKRAFKIKDFANTIPGHGGIMDRFDCQYLMATFVHVYITSFIRGPNPSKVLQQLLVLQPEQQLNIYKTLKTHLIEKGILQPTLKV

SEQ ID NO: 686 - protein, 364 aa, human
MPQTVILPGPAPWGFRLSGGIDFNQPLVITRITPGSKAAAANLCPGDVILAIDGFGTESMTHADAQDRIKAAAHQLCLKIDRGETHLWSPQVSEDGKAHPFKINLESEPQDGNYFEHKHNIRPKPFVIPGRSSGCSTPSGIDCGSGRSTPSSVSTVSTICPGDLKVAAKLAPNIPLEMELPGVKIVHAQFNTPMQLYSDDNIMETLQGQVSTALGETPLMNEPTASVPPESDVYRMLHDNRNEPTQPRQSGSFRVLQGMVDDGSDDRPAGTRSVRAPVTKVHGGSGGAQRMPLCDKCGSGIVGAVVKARDKYRHPECFVCADCNLNLKQKGYFFIEGELYCETHARARTKPPEGYDTVTLYPKA

SEQ ID NO: 687 - protein, 568 aa, human
MVLGPEQKMSDDSVSGDHGESASLGNINPAYSNPSLSQSPGDSEEYFATYFNEKISIPEEEYSCFSFRKLWAFTGPGFLMSIAYLDPGNIESDLQSGAVAGFKLLWILLLATLVGLLLQRLAARLGVVTGLHLAEVCHRQYPKVPRVILWLMVELAIIGSDMQEVIGSAIAINLLSVGRIPLWGGVLITIADTFVFLFLDKYGLRKLEAFFGFLITIMALTFGYEYVTVKPSQSQVLKGMFVPSCSGCRTPQIEQAVGIVGAVIMPHNMYLHSALVKSRQVNRNNKQEVREANKYFFIESCIALFVSFIINVFVVSVFAEAFFGKTNEQVVEVCTNTSSPHAGLFPKDNSTLAVDIYKGGVVLGCYFGPAALYIWAVGILAAGQSSTMTGTYSGQFVMEGFLNLKWSRFARVVLTRSIAIIPTLLVAVFQDVEHLTGMNDFLNVLQSLQLPFALIPILTFTSLRPVMSDFANGLGWRIAGGILVLIICSINMYFVVVYVRDLGHVALYVVAAVVSVAYLGFVFYLGWQCLIALGMSFLDCGHTCHLGLTAQPELYLLNTMDADSLVSR

SEQ ID NO: 688 - protein, 384 aa, human
MKVTSLDGRQLRKMLRKEAAARCVVLDCRPYLAFAASNVRGSLNVNLNSVVLRRARGGAVSARYVLPDEAARARLLQEGGGGVAAVVVLDQGSRHWQKLREESAARVVLTSLLACLPAGPRVYFLKGGYETFYSEYPECCVDVKPISQEKIESERALISQCGKPVVNVSYRPAYDQGGPVEILPFLYLGSAYHASKCEFLANLHITALLNVSRRTSEACMTHLHYKWIPVEDSHTADISSHFQEAIDFIDCVREKGGKVLVHCEAGISRSPTICMAYLMKTKQFRLKEAFDYIKQRRSMVSPNFGFMGQLLQYESEILPSTPNPQPPSCQGEAAGSSLIGHLQTLSPDMQGAYCTFPASVLAPVPTHSTVSELSRSPVATATSC

SEQ ID NO: 689 - protein, 293 aa, human
MATNESVSIFSSASLAVEYVDSLLPENPLQEPFKNAWNYMLNNYTKFQIATWGSLIVHEALYFLFCLPGFLFQFIPYMKKYKIQKDKPETWENQWKCFKVLLFNHFCIQLPLICGTYYFTEYFNIPYDWERMPRWYFLLARCFGCAVIEDTWHYFLHRLLHHKRIYKYIHKVHHEFQAPFGMEAEYAHPLETLILGTGFFIGIVLLCDHVILLWAWVTIRLLETIDVHSGYDIPLNPLNLIPFYAGSRHHDFHHMNFIGNYASTFTWWDRIFGTDSQYNAYNEKRKKFEKKTE

SEQ ID NO: 690 - protein, 259 aa, human [sequence omitted]

SEQ ID NO: 691 - protein, 728 aa, human
MAGPEGFQYRALYPFRRERPEDLELLPGDVLVVSRAALQALGVAEGGERCPQSVGWMPGLNERTRQRGDFPGTYVEFLGPVALARPGPRPRGPRPLPARPRDGAPEPGLTLPDLPEQFSPPDVAPPLLVKLVEAIERTGLDSESHYRPELPAPRTDWSLSDVDQWDTAALADGIKSFLLALPAPLVTPEASAEARRALREAAGPVGPALEPPTLPLHRALTLRFLLQHLGRVARRAPALGPAVRALGATFGPLLLRAPPPPSSPPPGGAPDGSEPSPDFPALLVEKLLQEHLEEQEVAPPALPPKPPKAKPAPTVLANGGSPPSLQDAEWYWGDISREEVNEKLRDTPDGTFLVRDASSKIQGEYTLTLRKGGNNKLIKVFHRDGHYGFSEPLTFCSVVDLINHYRHESLAQYNAKLDTRLLYPVSKYQQDQIVKEDSVEAVGAQLKVYHQQYQDKSREYDQLYEEYTRTSQELQMKRTAIEAFNETIKIFEEQGQTQEKCSKEYLERFRREGNEKEMQRILLNSERLKSRIAEIHESRTKLEQQLRAQASDNREIDKRMNSLKPDLMQLRKIRDQYLVWLTQKGARQKKINEWLGIKNETEDQYALMEDEDDLPHHEERTWYVGKINRTQAEEMLSGKRDGTFLIRESSQRGCYACSVVVDGDTKHCVIYRTATGFGFAEPYNLYGSLKELVLHYQHASLVQHNDALTVTLAHPVRAPGPGPPPAAR

SEQ ID NO: 692 - protein, 821 aa, human; identical to SEQ ID NO: 683

SEQ ID NO: 693 - protein, 477 aa, human; identical to SEQ ID NO: 643

SEQ ID NO: 694 - protein, 68 aa, human
MRTSYLLLFTLCLLLSEMASGGNFLTGLGHRSDHYNCVSSGGQCLYSACPIFTKIQGTCYRGKAKCCK

SEQ ID NO: 695 - protein, 574 aa, human
MWTFLGIATFTYFYKKFGDFITLANREVLLCVLVFLSLGLVLSYRCRHRNGGLLGRQRSGSQFALFSDILSGLPFIGFFWAKSPPESENKEQLGARRRRKGTNISETSLIGTAACTSTSSQNDPEVIIVGAGVLGSALVAVLSRDGRKVTVIERDLKEPDRIVGEFLQPGGYHVLKDLGLGDTVEGLDAQVVNGYMIHDQESKSEVQIPYPLSENNQVQSGRAFHHGRFIMSLRKAAMAEPNAKFIEGVVLQLLEEDDVVMGVQYKDKETGDIKELHAPLTVVADGLFSKFRKSLVSNKVSVSSHFVGFLMKNAPQFKANHAELILANPSPVLIYRISSSETRVLVDIRGEMPRNLREYMVEKIYPQIPDHLKEPFLEATDNSHLRSMLASFLPPSSVKKRGVLLLGDAYNMRHPLTGGGMTVAFKDIKLWRKLLKGIPDLYDDAAIFEANKSFYWARKTSHSFVVNILAQALYELFSATDDSLHQLRKACFLYFKLGGECVAGPVGLLSVLSPNPLALIGHFFAVAIYAVYFCFKSEPWITKPRALLSSSAVLYKACSVIFPLIYSEMKYMVH

SEQ ID NO: 696 - protein, 1873 aa, human
MDGCFQLCNVFRSHEMEIDQCLLESLPLGQRQRLVKRMRCEQIKAYYEREKAFQKQEGFLKRLKHAKNPKVHFNLTDMLQDAIIHHNDKEVLRLLKEGADPHTLVSSGGSLLHLCARYDNAFIAEILIDRGVNVNHQDEDFWTPMHIACACDNPDIVLLLVLAGANVLLQDVNGNIPLDYAVEGTESSSILLTYLDENGVDLTSLRQMKLQRPMSMLTDVKHFLSSGGNVNEKNDEGVTLLHMACASGYKEVVSLILEHGGDLNIVDDQYWTPLHLAAKYGQTNLVKLLLMHQANPHLVNCNEEKASDIAASEFIEEMLLKAEIAWEEKMKEPLSASTLAQEEPYEEIIHDLPVLSSKLSPLVLPIAKQDSLLEKDIMFKDATKGLCKQQSQDSIPENPMMSGSTKPEQVKLMPPAPNDDLATLSELNDGSLLYEIQKRFGNNQIYTFIGDILLLVNPYKELPIYSSMVSQLYFSSSGKLCSSLPPHLFSCVERAFHQLFREQRPQCFILSGERGSGKSEASKQIIRHLTCRAGASRATLDSRFKHVVCILEAFGHAKTTLNDLSSCFIKYFELQFCERKQQLTGARIYTYLLEKSRLVSQPLGQSNFLIFYLLMDGLSAEEKYGLHLNNLCAHRYLNQTIQDDASTGERSLNREKLAVLKRALNVVGFSSLEVENLFVILAAILHLGDIRFTALNEGNSAFVSDLQLLEQVAGMLQVSTDELASALTTDIQYFKGDMIIRRHTIQIAEFFRDLLAKSLYSRLFSFLVNTMNSCLHSQDEQKSMQTLDIGILDIFGFEEFQKNEFEQLCVNMTNEKMHHYINEVLFLHEQVECVQEGVTMETAYSPGNQNGVLDFFFQKPSGFLTLLDEESQMIWSVESNFPKKLQSLLESSNTNAVYSPMKDGNGNVALKDHGTAFTIMHYAGRVMYDVVGAIEKNKDSLSQNLLFVMKTSENVVINHLFQSKLSQTGSLVSAYPSFKFRGHKSALLSKKMTASSIIGENKNYLELSKLLKKKGTSTFLQRLERGDPVTIASQLRKSLMDIIGKLQKCTPHFIHCIRPNNSKLPDTFDNFYVSAQLQYIGVLEMVKIFRYGYPVRLSFSDFLSRYKPLADTFLREKKEQSAAERCRLVLQQCKLQGWQMGVRKVFLKYWHADQLNDLCLQLQRKIITCQKVIRGFLARQHLLQRISIRQQEVTSINSFLQNTEDMGLKTYDALVIQNASDIARENDRLRSEMNAPYHKEKLEVRNMQEEGSKRTDDKSGPRHFHPSSMSVCAAVDGLGQCLVGPSIWSPSLHSVFSMDDSSSLPSPRKQPPPKPKRDPNTRLSASYEAVSACLSAAREAANEALARPRPHSDDYSTMKKIPPRKPKRSPNTKLSGSYEEISGSRPGDARPAGAPGAAARVLTPGTPQCALPPAAPPGDEDDSEPVYIEMLGHAARPDSPDPGESVYEEMKCCLPDDGGPGAGSFLLHGASPPLLHRAPEDEAAGPPGDACDIPPPFPNLLPHRPPLLVFPPTPVTCSPASDESPLTPLEVKKLPVLETNLKYPVQPEGSSPLSPQYSKSQKGDGDRPASPGLALFNGSGRASPPSTPPPPPPPPGPPPAPYRPCAHLAFPPEPAPVNAGKAGPSAEAPKVHPKPNSAPVAGPCSSFPKIPYSPVKATRADARKAGSSASPPAPYSPPSSRPLSSPLDELASLFNSGRSVLRKSAAGRKIREAEGFETNMNISSRDDPSTSEITSETQDRNANNHGIQLSNSLSSAITAENGNSISNGLPEEDGYSRLSISGTGTSTFQRHRDSHTTQVIHQLRLSENESVALQELLDWRRKLCEEGQDWQQILHHAEPRVPPPPPCKKPSLLKKPEGASCNRLPSELWDTTI

SEQ ID NO: 697 - protein, 740 aa, human
MSFGRDMELEHFDERDKAQRYSRGSRVNGLPSPTHSAHCSFYRTRTLQTLSSEKKAKKVRFYRNGDRYFKGIVYAISPDRFRSFEALLADLTRTLSDNVNLPQGVRTIYTIDGLKKISSLDQLVEGESYVCGSIEPFKKLEYTKNVNPNWSVNVKTTSASRAVSSLATAKGSPSEVRENKDFIRPKLVTIIRSGVKPRKAVRILLNKKTAHSFEQVLTDITDAIKLDSGVVKRLYTLDGKQVMCLQDFFGDDDIFIACGPEKFRYQDDFLLDESECRVVKSTSYTKIASSSRRSTTKSPGPSRRSKSPASTSSVNGTPGSQLSTPRSGKSPSPSPTSPGSLRKQRSSQHGGSSTSLASTKVCSSMDENDGPGEEVSEEGFQIPATITERYKVGRTIGDGNFAVVKECVERSTAREYALKIIKKSKCRGKEHMIQNEVSILRRVKHPNIVLLIEEMDVPTELYLVMELVKGGDLFDAITSTNKYTERDASGMLYNLASAIKYLHSLNIVHRDIKPENLLVYEHQDGSKSLKLGDFGLATIVDGPLYTVCGTPTYVAPEIIAETGYGLKVDIWAAGVITYILLCGFPPFRGSGDDQEVLFDQILMGQVDFPSPYWDNVSDSAKELITMMLLVDVDQRFSAVQVLEHPWVNDDGLPENEHQLSVAGKIKKHFNTGPKPNSTAAGVSVIATTALDKERQVFRRRRNQDVRSRYKAQPAPPELNSESEDYSPSSSETVRSPNSPF

SEQ ID NO: 698 - protein, 447 aa, human
MAGAGGGNDIQWCFSQVKGAVDDDVAEADIISTVEFNHSGELLATGDKGGRVVIFQQEQENKIQSHSRGEYNVYSTFQSHEPEFDYLKSLEIEEKINKIRWLPQKNAAQFLLSTNDKTIKLWKISERDKRPEGYNLKEEDGRYRDPTTVTTLRVPVFRPMDLMVEASPRRIFANAHTYHINSISINSDYETYLSADDLRINLWHLEITDRSFNIVDIKPANMEELTEVITAAEFHPNSCNTFVYSSSKGTIRLCDMRASALCDRHSKLFEEPEDPSNRSFFSEIISSISDVKFSHSGRYMMTRDYLSVKIWDLNMENRPVETYQVHEYLRSKLCSLYENDCIFDKFECCWNGSDSVVMTGSYNNFFRMFDRNTKRDITLEASRENNKPRTVLKPRKVCASGKRKKDEISVDSLDFNKKILHTAWHPKENIIAVATTNNLYIFQDKVN

SEQ ID NO: 699 - protein, 1585 aa, human
KLTGAIMHFGNMKFKLKQREEQAEPDGTEEADKSAYLMGLNSADLLKGLCHPRVKVGNEYVTKGQNVQQVIYATGALAKAVYERMFNWMVTRINATLETKQPRQYFIGVLDIAGFEIFDFNSFEQLCINFTNEKLQQFFNHHMFVLEQEEYKKEGIEWTFIDFGMDLQACIDLIEKPMGIMSILEEECMFPKATDMTFKAKLFDNHLGKSANFQKPRNIKGKPEAHFSLIHYAGIVDYNIIGWLQKNKDPLNETVVGLYQKSSLKLLSTLFANYAGADAPIEKGKGKAKKGSSFQTVSALHRENLNKLMTNLRSTHPHFVRCIIPNETKSPGVMDNPLVMHQLRCNGVLEGIRICRKGFPNRILYGDFRQRYRILNPAAIPEGQFIDSRKGAEKLLSSLDIDHNQYKFGHTKVFFKAGLLGLLEEMRDERLSRIITRIQAQSRGVLARMEYKKLLERRDSLLVIQWNIRAFMGVKNWPWMKLYFKIKPLLKSAEREKEMASMKEEFTRLKEALEKSEARRKELEEKMVSLLQEKNDLQLQVQAEQDNLADAEERCDQLIKNKIQLEAKVKEMNERLEDEEEMNAELTAKKRKLEDECSELKRDIDDLELTLAKVEKEKHATENKVKNLTEEMAGLDEIIAKLTKEKKALQEAHQQALDDLQAEEDKVNTLTKAKVKLEQQVDDLEGSLEQEKKVRMDLERAKRKLEGDLKLTQESIMDLENDKQQLDERLKKKDFELNALNARIEDEQALGSQLQKKLKELQARIEELEEELESERTARAKVEKLRSDLSRELEEISERLEEAGGATSVQIEMNKKREAEFQKMRRDLEEATLQHEATAAALRKKHADSVAELGEQIDNLQRVKQKLEKEKSEFKLELDDVTSNMEQIIKAKANLEKMCRTLEDQMNEHRSKAEETQRSVNDLTSQRAKLQTENGELSRQLDEKEALISQLTRGKLTYTQQLEDLKRQLEEEVKAKNALAHALQSARHDCDLLREQYEEETEAKAELQRVLSKANSEVAQWRTKYETDAIQRTEELEEAKKKLAQRLQEAEEAVEAVNAKCSSLEKTKHRLQNEIEDLMVDVERSNAAAAALDKKQRNFDKILAEWKQKYEESQSELESSQKEARSLSTELFKLKNAYEESLEHLETFKRENKNLQEEISDLTEQLGSSGKTIHELEKVRKQLEAEKMELQSALEEAEASLEHEEGKILRAQLEFNQIKAEIERKLAEKDEEMEQAKRNHLRVVDSLQTSLDAETRSRNEALRVKKKMEGDLNEMEIQLSHANRMAAEAQKQVKSLQSLLKDTQIQLDDAVRANDDLKENIAIVERRNNLLQAELEELRAVVEQTERSRKLAEQELIETSERVQLLHSQNTSLINQKKKMDADLSQLQTEVEEAVQECRNAEEKAKKAITDAAMMAEELKKEQDTSAHLERMKKNMEQTIKDLQHRLDEAEQIALKGGKKQLQKLEARVRELENELEAEQKRNAESVKGMRKSERRIKELTYQTEEDRKNLLRLQDLVDKLQLKVKAYKRQAEEAEEQANTNLSKFRKVQHELDEAEERADIAESQVNKLRAKSRDIGTKGLNEE

SEQ ID NO: 700 - protein, 320 aa, human
MELLSPPLRDVDLTAPDGSLCSFATTDDFYDDPCFDSPDLRFFEDLDPRLMHVGALLKPEEHSHFPAAVHPAPGAREDEHVRAPSGHHQAGRCLLWACKACKRKTTNADRRKAATMRERRRLSKVNEAFETLKRCTSSNPNQRLPKVEILRNAIRYIEGLQALLRDQDAAPPGAAAAFYAPGPLPPGRGGEHYSGDSDASSPRSNCSDGMMDYSGPPSGARRRNCYEGAYYNEAPSEPRPGKSAAVSSLDCLSSIVERISTESPAAPALLLADVPSESPPRRQEAAAPSEGESSGDPTQSPDAAPQCPAGANPNPIYQVL

SEQ ID NO: 701 - protein, 1091 aa, human
MAAGCLLALTLTLFQSLLIGPSSEEPFPSAVTIKSWVDKMQEDLVTLAKTASGVNQLVDIYEKYQDLYTVEPNNARQLVEIAARDIEKLLSNRSKALVSLALEAEKVQAAHQWREDFASNEVVYYNAKDDLDPEKNDSEPGSQRIKPVFIEDANFGRQISYQHAAVHIPTDIYEGSTIVLNELNWTSALDEVFKKNREEDPSLLWQVFGSATGLARYYPASPWVDNSRTPNKIDLYDVRRRPWYIQGAASPKDMLILVDVSGSVSGLTLKLIRTSVSEMLETLSDDDFVNVASFNSNAQDVSCFQHLVQANVRNKKVLKDAVNNITAKGITDYKKGFSFAFEQLLNYNVSRANCNKIIMLFTDGGEERAQEIFNKYNKDKKVRVFRFSVGQHNYERGPIQWMACENKGYYYEIPSIGAIRINTQEYLDVLGRPMVLAGDKAKQVQWTNVYLDALELGLVITGTLPVFNITGQFENKTNLKNQLILGVMGVDVSLEDIKRLTPRFTLCPNGYYFAIDPNGYVLLHPNLQPKNPKSQEPVTLDFLDAELENDIKVEIRNKMIDGESGEKTFRTLVKSQDERYIDKGNRTYTWTPVNGTDYSLALVLPTYSFYYIKAKLEETITQARSKKGKMKDSETLKPDNFEESGYTFIAPRDYCNDLKISDNNTEFLLNFNEFIDRKTPNNPSCNADLINRVLLDAGFTNELVQNYWSKQKNIKGVKARFVVTDGGITRVYPKEAGENWQENPETYEDSFYKRSLDNDNYVFTAPYFNKSGPGAYESGIMVSKAVEIYIQGKLLKPAVVGIKIDVNSWIENFTKTSIRDPCAGPVCDCKRNSDVMDCVILDDGGFLLMANHDDYTNQIGRFFGEIDPSLMRHLVNISVYAFNKSYDYQSVCEPGAAPKQGAGHRSAYVPSVADILQIGWWATAAAWSILQQFLLSLTFPRLLEAVEMEDDDFTASLSKQSCITEQTQYFFDNDSKSFSGVLDCGNCSRIFHGEKLMNTNLIFIMVESKGTCPCDTRLLIQAEQTSDGPNPCDMVKQPRYRKGPDVCFDNNVLEDYTDCGGVSGLNPSLWYIIGIQFLLLWLVSGSTHRLL

SEQ ID NO: 702 - protein, 417 aa, human
MEFVKCLGHPEEFYNLVRFRIGGKRKVMPKMDQDSLSSSLKTCYKYLNQTSRSFAAVIQALDGEMRNAVCIFYLVLRALDTLEDDMTISVEKKVPLLHNFHSFLYQPDWRFMESKEKDRQVLEDFPTISLEFRNLAEKYQTVIADICRRMGIGMAEFLDKHVTSEQEWDKYCHYVAGLVGIGLSRLFSASEFEDPLVGEDTERANSMGLFLQKTNIIRDYLEDQQGGREFWPQEVWSRYVKKLGDFAKPENIDLAVQCLNELITNALHHIPDVITYLSRLRNQSVFNFCAIPQVMAIATLAACYNNQQVFKGAVKIRKGQAVTLMMDATNMPAVKAIIYQYMEEIYHRIPDSDPSSSKTRQIISTIRTQNLPNCQLISRSHYSPIYLSFVMLLAALSWQYLATLSQVTEDYVQTGEH

SEQ ID NO: 703 - protein, 885 aa, human
AKRKLEGDLKLTQESIMDLENDKQQLDERLKKKDFELNALNARIEDEQALGSQLQKKLKELQARIEELEEELESERTARAKVEKLRSDLSRELEEISERLEEAGGATSVQIEMNKKREAEFQKMRRDLEEATLQHEATAAALRKKHADSVAELGEQIDNLQRVKQKLEKEKSEFKLELDDVTSNMEQIIKAKANLEKMCRTLEDQMNEHRSKAEETQRSVNDLTSQRAKLQTENGELSRQLDEKEALISQLTRGKLTYTQQLEDLKRQLEEEVKAKNALAHALQSARHDCDLLREQYEEETEAKAELQRVLSKANSEVAQWRTKYETDAIQRTEELEEAKKKLAQRLQEAEEAVEAVNAKCSSLEKTKHRLQNEIEDLMVDVERSNAAAAALDKKQRNFDKILAEWKQKYEESQSELESSQKEARSLSTELFKLKNAYEESLEHLETFKRENKNLQEEISDLTEQLGSSGKTIHELEKVRKQLEAEKMELQSALEEAEASLEHEEGKILRAQLEFNQIKAEIERKLAEKDEEMEQAKRNHLRVVDSLQTSLDAETRSRNEALRVKKKMEGDLNEMEIQLSHANRMAAEAQKQVKSLQSLLKDTQIQLDDAVRANDDLKENIAIVERRNNLLQAELEELRAVVEQTERSRKLAEQELIETSERVQLLHSQNTSLINQKKKMDADLSQLQTEVEEAVQECRNAEEKAKKAITDAAMMAEELKKEQDTSAHLERMKKNMEQTIKDLQHRLDEAEQIALKGGKKQLQKLEARVRELENELEAEQKRNAESVKGMRKSERRIKELTYQTEEDRKNLLRLQDLVDKLQLKVKAYKRQAEEAEEQANTNLSKFRKVQHELDEAEERADIAESQVNKLRAKSRDIGTKGLNEE

SEQ ID NO: 704 - protein, 4594 aa, human
EAALEEKSALEQMRKFLSDPQVHTVLVERSTLKEDVGDEGEEEKEFISYNINIDIHYGVKSNSLAFIKRTPVIDADKPVSSQLRVLTLSEDSPYETLHSFISNAVAPFFKSYIRESGKADRDGDKMAPSVEKKIAELEMGLLHLQQNIEIPEISLPIHPMITNVAKQCYERGEKPKVTDFGDKVEDPTFLNQLQSGVNRWIREIQKVTKLDRDPASGTALQEISFWLNLERALYRIQEKRESPEVLLTLDILKHGKRFHATVSFDTDTGLKQALETVNDYNPLMKDFPLNDLLSATELDKIRQALVAIFTHLRKIRNTKYPIQRALRLVEAISRDLSSQLLKVLGTRKLMHVAYEEFEKVMVACFEVFQTWDDEYEKLQVLLRDIVKRKREENLKMVWRINPAHRKLQARLDQMRKFRRQHEQLRAVIVRVLRPQVTAVAQQNQGEVPEPQDMKVAEVLFDAADANAIEEVNLAYENVKEVDGLDVSKEGTEAWEAAMKRYDERIDRVETRITARLRDQLGTAKNANEMFRIFSRFNALFVRPHIRGAIREYQTQLIQRVKDDIESLHDKFKVQYPQSQACKMSHVRDLPPVSGSIIWAKQIDRQLTAYMKRVEDVLGKGWENHVEGQKLKQDGDSFRMKLNTQEIFDDWARKVQQRNLGVSGRIFTIESTRVRGRTGNVLKLKVNFLPEIITLSKEVRNLKWLGFRVPLAIVNKAHQANQLYPFAISLIESVRTYERTCEKVEERNTISLLVAGLKKEVQALIAEGIALVWESYKLDPYVQRLAETVFNFQEKVDDLLIIEEKIDLEVRSLETCMYDHKTFSEILNRVQKAVDDLNLHSYSNLPIWVNKLDMEIERILGVRLQAGLRAWTQVLLGQAEDKAEVDMDTDAPQVSHKPGGEPKIKNVVHELRITNQVIYLNPPIEECRYKLYQEMFAWKMVVLSLPRIQSQRYQVGVHYELTEEEKFYRNALTRMPDGPVALEESYSAVMGIVSEVEQYVKVWLQYQCLWDMQAENIYNRLGEDLNKWQALLVQIRKARGTFDNAETKKEFGPVVIDYGKVQSKVNLKYDSWHKEVLSKFGQMLGSNMTEFHSQISKSRQELEQHSVDTASTSDAVTFITYVQSLKRKIKQFEKQVELYRNGQRLLEKQRFQFPPSWLYIDNIEGEWGAFNDIMRRKDSAIQQQVANLQMKIVQEDRAVESRTTDLLTDWEKTKPVTGNLRPEEALQALTIYEGKFGRLKDDREKCAKAKEALELTDTGLLSGSEERVQVALEELQDLKGVWSELSKVWEQIDQMKEQPWVSVQPRKLRQNLDALLNQLKSFPARLRQYASYEFVQRLLKGYMKINMLVIELKSEALKDRHWKQLMKRLHVNWVVSELTLGQIWDVDLQKNEAIVKDVLLVAQGEMALEEFLKQIREVWNTYELDLVNYQNKCRLIRGWDDLFNKVKEHINSVSAMKLSPYYKVFEEDALSWEDKLNRIMALFDVWIDVQRRWVYLEGIFTGSADIKHLLPVETQRFQSISTEFLALMKKVSKSPLVMDVLNIQGVQRSLERLADLLGKIQKALGEYLERERSSFPRFYFVGDEDLLEIIGNSKNVAKLQKHFKKMFAGVSSIILNEDNSVVLGISSREGEEVMFKTPVSITEHPKINEWLTLVEKEMRVTLAKLLAESVTEVEIFGKATSIDPNTYITWIDKYQAQLVVLSAQIAWSENVETALSSMGGGGDAAPLHSVLSNVEVTLNVLADSVLMEQPPLRRRKLEHLITELVHQRDVTRSLIKSKIDNAKSFEWLSQMRFYFDPKQTDVLQQLSIQMANAKFNYGFEYLGVQDKLVQTPLTDRCYLTMTQALEARLGGSPFGPAGTGKTESVKALGHQLGRFVLVFNCDETFDFQAMGRIFVGLCQVGAWGCFDEFNRLEERMLSAVSQQVQCIQEALREHSNPNYDKTSAPITCELLNKQVKVSPDMAIFITMNPGYAGRSNLPDNLKKLFRSLAMTKPDRQLIAQVMLYSQGFRTAEVLANKIVPFFKLCDEQLSSQSHYDFGLRALKSVLVSAGNVKRERIQKIKREKEERGEAVDEGEIAENLPEQEILIQSVCETMVPKLVAEDIPLLFSLLSDVFPGVQYHRGEMTALREELKKVCQEMYLTYGDGEEVGGMWVEKVLQLYQITQINHGLMMVGPSGSGKSMAWRVLLKALERLEGVEGVAHIIDPKAISKDHLYGTLDPNTREWTDGLFTHVLRKIIDSVRGELQKRQWIVFDGDVDPEWVENLNSVLDDNKLLTLPNGERLSLPPNVRIMFEVQDLKYATLATVSRCGMVWFSEDVLSTDMIFNNFLARLRSIPLDEGEDEAQRRRKGKEDEGEEAASPMLQIQRDAATIMQPYFTSNGLVTKALEHAFQLEHIMDLTRLRCLGSLFSMLHQACRNVAQYNANHPDFPMQIEQLERYIQRYLVYAILWSLSGDSRLKMRAELGEYIRRITTVPLPTAPNIPIIDYEVSISGEWSPWQAKVPQIEVETHKVAAPDVVVPTLDTVRHEALLYTWLAEHKPLVLCGPPGSGKTMTLFSALRALPDMEVVGLNFSSATTPELLLKTFDHYCEYRRTPNGVVLAPVQLGKWLVLFCDEINLPDMDKYGTQRVISFIRQMVEHGGFYRTSDQTWVKLERIQFVGACNPPTDPGRKPLSHRFLRHVPVVYVDYPGPASLTQIYGTFNRAMLRLIPSLRTYAEPLTAAMVEFYTMSQERFTQDTQPHYIYSPREMTRWVRGIFEALRPLETLPVEGLIRIWAHEALRLFQDRLVEDEERRWTDENIDTVALKHFPNIDREKAMSRPILYSNWLSKDYIPVDQEELRDYVKARLKVFYEEELDVPLVLFNEVLDHVLRIDRIFRQPQGHLLLIGVSGAGKTTLSRFVAWMNGLSVYQIKVHRKYTGEDFDEDLRTVLRRSGCKNEKIAFIMDESNVLDSGFLERMNTLLANGEVPGLFEGDEYATLMTQCKEGAQKEGLMLDSHEELYKWFTSQVIRNLHVVFTMNPSSEGLKDRAATSPALFNRCVLNWFGDWSTEALYQVGKEFTSKMDLEKPNYIVPDYMPVVYDKLPQPPSHREAIVNSCVFVHQTLHQANARLAKRGGRTMAITPRHYLDFINHYANLFHEKRSELEEQQMHLNVGLRKIKETVDQVEELRRDLRIKSQELEVKNAAANDKLKKMVKDQQEAEKKKVMSQEIQEQLHKQQEVIADKQMSVKEDLDKVEPAVIEAQNAVKSIKKQHLVEVRSMANPPAAVKLALESICLLLGESTTDWKQIRSIIMRENFIPTIVNFSAEEISDAIREKMKKNYMSNPSYNYEIVNRASLACGPMVKWAIAQLNYADMLKRVEPLRNELQKLEDDAKDNQQKANEVEQMIRDLEASIARYKEEYAVLISEAQAIKADLAAVEAKVNRSTALLKSLSAERERWEKTSETFKNQMSTIAGDCLLSAAFIAYAGYFDQQMRQNLFTTWSHHLQQANIQFRTDIARTEYLSNADERLRWQASSLPADDLCTENAIMLKRFNRYPLIIDPSGQATEFIMNEYKDRKITRTSFLDDAFRKNLESALRFGNPLLVQDVESYDPVLNPVLNREVRRTGGRVLITLGDQDIDLSPSFVIFLSTRDPTVEFPPDLCSRVTFVNFTVTRSSLQSQCLNEVLKAERPDVDEKRSDLLKLQGEFQLRLRQLEKSLLQALNEVKGRILDDDTIITTLENLKREAAEVTRKVEETDIVMQEVETVSQQYLPLSTACSSIYFTMESLKQIHFLYQYSLQFFLDIYHNVLYENPNLKGVTDHTQRLSIITKDLFQVAFNRVARGMLHQDHITFAMLLARIKLKGTVGEPTYDAEFQHFLRGNEIVLSAGSTPRIQGLTVEQAEAVVRLSCLPAFKDLIAKVQADEQFGIWLDSSSPEQTVPYLWSEETPATPIGQAIHRLLLIQAFRPDRLLAMAHMFVSTNLGESFMSIMEQPLDLTHIVGTEVKPNTPVLMCSVPGYDASGHVEDLAAEQNTQITSIAIGSAEGFNQADKAINTAVKSGRWVMLKNVHLAPGWLMQLEKKLHSLQPHACFRLFLTMEINPKVPVNLLRAGRIFVFEPPPGVKANMLRTFSSIPVSRICKSPNERARLYFLLAWFHAIIQERLRYAPLGWSKKYEFGESDLRSACDTVDTWLDDTAKGRQNISPDKIPWSALKTLMAQSIYGGRVDNEFDQRLLNTFLERLFTTRSFDSEFKLACKVDGHKDIQMPDGIRREEFVQWVELLPDTQTPSWLGLPNNAERVLLTTQGVDMISKMLKMQMLEDEDDLAYAETEKKTRTDSTSDGRPAWMRTLHTTASNWLHLIPQTLSHLKRTVENIKDPLFRFFEREVKMGAKLLQDVRQDLADVVQVCEGKKKQTNYLRTLINELVKGILPRSWSHYTVPAGMTVIQWVSDFSERIKQLQNISLAAASGGAKELKNIHVCLGGLFVPEAYITATRQYVAQANSWSLEELCLEVNVTTSQGATLDACSFGVTGLKLQGATCNNNKLSLSNAISTALPLTQLRWVKQTNTEKKASVVTLPVYLNFTRADLIFTVDFEIATKEDPRSFYERGVAVLCTE

SEQ ID NO: 705 - protein, 88 aa, human; identical to SEQ ID NO: 653

SEQ ID NO: 706 - protein, 817 aa, human
MMDGPRSDVGRWGGNPLQPPTTPSPEPEPEPDGRSRRGGGRSFWARCCGCCSCRNAADDDWGPEPSDSRGRGSSSGTRRPGSRGSDSRRPVSRGSGVNAAGDGTIREGMLVVNGVDLLSSRSDQNRREHHTDEYEYDELIVRRGQPFHMLLLLSRTYESSDRITLELLIGNNPEVGKGTHVIIPVGKGGSGGWKAQVVKASGQNLNLRVHTSPNAIIGKFQFTVRTQSDAGEFQLPFDPRNEIYILFNPWCPEDIVYVDHEDWRQEYVLNESGRIYYGTEAQIGERTWNYGQFDHGVLDACLYILDRRGMPYGGRGDPVNVSRVISAMVNSLDDNGVLIGNWSGDYSRGTNPSAWVGSVEILLSYLRTGYSVPYGQCWVFAGVTTTVLRCLGLATRTVTNFNSAHDTDTSLTMDIYFDENMKPLEHLNHDSVWNFHVWNDCWMKRPDLPSGFDGWQVVDATPQETSSGIFCCGPCSVESIKNGLVYMKYDTPFIFAEVNSDKVYWQRQDDGSFKIVYVEEKAIGTLIVTKAISSNMREDITYLYKHPEGSDAERKAVETAAAHGSKPNVYANRGSAEDVAMQVEAQDAVMGQDLMVSVMLINHSSSRRTVKLHLYLSVTFYTGVSGTIFKETKKEVELAPGASDRVTMPVAYKEYRPHLVDQGAMLLNVSGHVKESGQVLAKQHTFRLRTPDLSLTLLGAAVVGQECEVQIVFKNPLPVTLTNVVFRLEGSGLQRPKILNVGDIGGNETVTLRQSFVPVRPGPRQLIASLDSPQLSQVHGVIQVDVAPAPGDGGFFSDAGGDSHLGETIPMASRGGA

SEQ ID NO: 707 - protein, 283 aa, human
MCNTPTYCDLGKAAKDVFNKGYGFGMVKIDLKTKSCSGVEFSTSGHAYTDTGKASGNLETKYKVCNYGLTFTQKWNTDNTLGTEISWENKLAEGLKLTLDTIFVPNTGKKSGKLKASYKRDCFSVGSNVDIDFSGPTIYGWAVLAFEGWLAGYQMSFDTAKSKLSQNNFALGYKAADFQLHTHVNDGTEFGGSIYQKVNEKIETSINLAWTAGSNNTRFGIAAKYMLDCRTSLSAKVNNASLIGLGYTQTLRPGVKLTLSALIDGKNFSAGGHKVGLGFELEA

SEQ ID NO: 708 - protein, 1025 aa, human
NKIQLEAKVKEMNERLEDEEEMNAELTAKKRKLEDECSELKRDIDDLELTLAKVEKEKHATENKVKNLTEEMAGLDEIIAKLTKEKKALQEAHQQALDDLQAEEDKVNTLTKAKVKLEQQVDDLEGSLEQEKKVRMDLERAKRKLEGDLKLTQESIMDLENDKQQLDERLKKKDFELNALNARIEDEQALGSQLQKKLKELQARIEELEEELESERTARAKVEKLRSDLSRELEEISERLEEAGGATSVQIEMNKKREAEFQKMRRDLEEATLQHEATAAALRKKHADSVAELGEQIDNLQRVKQKLEKEKSEFKLELDDVTSNMEQIIKAKANLEKMCRTLEDQMNEHRSKAEETQRSVNDLTSQRAKLQTENGELSRQLDEKEALISQLTRGKLTYTQQLEDLKRQLEEEVKAKNALAHALQSARHDCDLLREQYEEETEAKAELQRVLSKANSEVAQWRTKYETDAIQRTEELEEAKKKLAQRLQEAEEAVEAVNAKCSSLEKTKHRLQNEIEDLMVDVERSNAAAAALDKKQRNFDKILAEWKQKYEESQSELESSQKEARSLSTELFKLKNAYEESLEHLETFKRENKNLQEEISDLTEQLGSSGKTIHELEKVRKQLEAEKMELQSALEEAEASLEHEEGKILRAQLEFNQIKAEIERKLAEKDEEMEQAKRNHLRVVDSLQTSLDAETRSRNEALRVKKKMEGDLNEMEIQLSHANRMAAEAQKQVKSLQSLLKDTQIQLDDAVRANDDLKENIAIVERRNNLLQAELEELRAVVEQTERSRKLAEQELIETSERVQLLHSQNTSLINQKKKMDADLSQLQTEVEEAVQECRNAEEKAKKAITDAAMMAEELKKEQDTSAHLERMKKNMEQTIKDLQHRLDEAEQIALKGGKKQLQKLEARVRELENELEAEQKRNAESVKGMRKSERRIKELTYQTEEDRKNLLRLQDLVDKLQLKVKAYKRQAEEAEEQANTNLSKFRKVQHELDEAEERADIAESQVNKLRAKSRDIGTKGLNEE

SEQ ID NO: 709 - protein, 5689 aa, human
MDQAQVSPLALDNMGLAQDNPLALDNMSLDQVSLAMANTVLAQVSHLAMANMGLDRHLALDNMGQAQVNPLALANMDQAQVSPLALDNMGLAQDNPLALDSMSLDHISPAMANMVLAQVNHLAMVNMGQVRDRHLALDNTGQAQVNTLALDNMDQAQVSPVALDNMGLAQDNTLVLDNMSLDHISLAMANMVLAQVSHLAMVNMGQVQDRLLDLDNTGQAQVNPLALANMDQAQVSPLALDNMSQAQENPLALDSMSLDQVSLIMANMVLAQVSHLAMVNMGLVQDRQLALDNTGQAQANTQALDNMDQAQISPLALDNMGLVQDNPLVLDNMSLDHVSLAMANMVLAQVNHLAMVNMGQIQDRHLDLDNTGQAQVSPLALANMDRAQHEYRSGQSSYGQHGTGSSQSSGCGQHESGSGPTTSFGQHVSGSDNFSSSGQHISDSGQSTGFGQYGSGSGQSTGLGQGESQQVESGSTVHGRQETTHGQTINTTRHSQSGQGQSTQTGSRVTRRRRSSQSENSDSEVHSKVSHRHSEHIHTQAGSHYPKSGSTVRRRQGTTHGQRGDTTRHGHSGHGQSTQTGSRTSGRQRFSHSDATDSEVHSGVSHRPHSQEQTHSQAGSQHGESESTVHERHETTYGQTGEATGHGHSGHGQSTQRGSRTTGRRGSGHSESSDSEVHSGGSHRPQSQEQTHGQAGSQHGESGSTVHGRHGTTHGQTGDTTRHAHYHHGKSTQRGSSTTGRRGSGHSESSDSEVHSGGSHTHSGHTHGQSGSQHGESESIIHDRHRITHGQTGDTTRHSYSGHEQTTQTGSRTTGRQRTSHSESTDSEVHSGGSHRPHSREHTYGQAGSQHEEPEFTVHERHGTTHGQIGDTTGHSHSGHGQSTQRGSRTTGRQRSSHSESSDSEVHSGVSHTHTGHTHGQAGSQHGQSESIVPERHGTTHGQTGDTTRHAHYHHGLTTQTGSRTTGRRGSGHSEYSDSEGYSGVSHTHSGHTHGQARSQHGESESIVHERHGTIHGQTGDTTRHAHSGHGQSTQTGSRTTGRRSSGHSEYSDSEGHSGFSQRPHSRGHTHGQAGSQHGESESIVDERHGTTHGQTGDTSGHSQSGHGQSTQSGSSTTGRRRSGHIMDKPYRQGPGQLEEGDLATVSTVTVKGPQGSHTHIQDTLTVKLDLTIQSQDPQFMRDTELLMDKQQIPLDMATLVMDSPHREGPGQLEEGHLATVSTVTVKGTQGSHTHIQDTLMAKPDLNMESQDPQFMRDTELLMDRQEIPLDMLTLVMDSPHREGQGQLEEGDLATVSPVTVKCTQGSHTHIQDTLMAKPDLNMESQDLPFTGDRELYMDRQEIPLDMASLVMDSPHRQVPGQLEDKDLVTVSPVIVKCTQRPHPHIQDTLTAKPDLDMDSQDPQVMGDRELLMDRQEIPLDMPTMVMDNPHREGPGQLEEGDLATVSPVTVKCTHGAHTHIQDTFRAKLDLNKDSQDPQFMGDWKLLMDRQEIPLDMAILVMDNPHRQVPDLVEQVIFSHIVVKGKGMDQVRFGNMAAMDLQNMTMGTLVSKATKRTGRHSLNHEQSMVSYEHSVDSQYQSRPIIIRSQESSHGHSIVTHKQSNNTYVQPGYNTARREGCTHSQSNDHLGFGHGQSISVHGHSKSSSIRKQESHTDNKKHSEDWEKDTHEQLGSRHGKLEFNTIGIHGSSQQHFGDTTFHGQVHIYCQKMSTLLENIFAIINLFKQYSKKDKNTDTLSKKELKELLEKEFRQILKNPDDPDMVDVFMDHLDIDHNKKIDFTEFLLMVFKLAQAYYESTRKENLPISGHKHRKHSHHDKHEDNKQEENKENRKRPSSLERRNNRKGNKGRSKSPRETGGKRHESSSEKKERKGYSPTHREEEYGKNHHNSSKKEKNKTENTRLGDNRKRLSERLEEKEDNEEGVYDYENTGRMTQKWIQSGHIATYYTIQDEAYDTTDSLLEENKIYERSRSSDGKSSSQVNRSRHENTSQVPLQESRTRKRRGSRVSQDRDSEGHSEDSERHSGSASRNHHGSAWEQSRDGSRHPRSHDEDRASHGHSADSSRQSGTRHAETSSRGQTASSHEQARSSPGERHGSGHQQSADSSRHSATGRGQASSAVSDRGHRGSSGSQASDSEGHSENSDTQSVSGHGKAGLRQQSHQESTRGRSGERSGRSGSSLYQVSTHEQPDSAHGRTGTSTGGRQGSHHEQARDSSRHSASQEGQDTIRGHPGSSRGGRQGSHHEQSVNRSGHSGSHHSHTTSQGRSDASHGQSGSRSASRQTRNEEQSGDGTRHSGSRHHEASSQADSSRHSQVGQGQSSGPRTSRNQGSSVSQDSDSQGHSEDSERWSGSASRNHHGSAQEQSRDGSRHPRSHHEDRAGHGHSADSSRKSGTRHTQNSSSGQAASSHEQARSSAGERHGSRHQLQSADSSRHSGTGHGQASSAVRDSGHRGSSGSQATDSEGHSEDSDTQSVSGHGQAGHHQQSHQESARDRSGERSRRSGSFLYQGRSDASRGQSGSRSASRTTRNEEQSRDGSRHSGSRHHEASSHADISRHSQAGQGQSEGSRTSRRQGSSVSQDSDSEGHSEDSERWSGSASRNHRGSAQEQSRHGSRHPRSHHEDRAGHGHSADSSRQSGTPHAETSSGGQAASSHEQARSSPGERHGSRHQQSADSSRHSGIPRRQASSAVRDSGHWGSSGSQASDSEGHSEESDTQSVSGHGQDGPHQQSHQESARDWSGGRSGRSGSFIYQVSTHEQSESAHGRTRTSTGRRQGSHHEQARDSSRHSASQEGQDTIRAHPGSRRGGRQGSHHEQSVDRSGHSGSHHSHTTSQGRSDASHGQSGSRSASRQTRKDKQSGDGSRHSGSRHHEAASWADSSRHSQVGQEQSSGSRTSRHQGSSVSQDSDSERHSDDSERLSGSASRNHHGSSREQSRDGSRHPGFHQEDRASHGHSADSSRQSGTHHTESSSHGQAVSSHEQARSSPGERHGSRHQQSADSSRHSGIGHRQASSAVRDSGHRGSSGSQVTNSEGHSEDSDTQSVSAHGQAGPHQQSHKESARGQSGESSGRSRSFLYQVSSHEQSESTHGQTAPSTGGRQGSRHEQARNSSRHSASQDGQDTIRGHPGSSRGGRQGSYHEQSVDRSGHSGYHHSHTTPQGRSDASHGQSGPRSASRQTRNEEQSGDGSRHSGSRHHEPSTRAGSSRHSQVGQGESAGSKTSRRQGSSVSQDRDSEGHSEDSERRSESASRNHYGSAREQSRHGSRNPRSHQEDRASHGHSAESSRQSGTRHAETSSGGQAASSQEQARSSPGERHGSRHQQSADSSTDSGTGRRQDSSVVGDSGNRGSSGSQASDSEGHSEESDTQSVSAHGQAGPHQQSHQESTRGQSGERSGRSGSFLYQVSTHEQSESAHGRTGPSTGGRQRSRHEQARDSSRHSASQEGQDTIRGHPGSSRGGRQGSHYEQSVDSSGHSGSHHSHTTSQERSDVSRGQSGSRSVSRQTRNEKQSGDGSRHSGSRHHEASSRADSSRHSQVGQGQSSGPRTSRNQGSSVSQDSDSQGHSEDSERWSGSASRNHLGSAWEQSRDGSRHPGSHHEDRAGHGHSADSSRQSGTRHTESSSRGQAASSHEQARSSAGERHGSHHQLQSADSSRHSGIGHGQASSAVRDSGHRGYSGSQASDSEGHSEDSDTQSVSAQGKAGPHQQSHKESARGQSGESSGRSGSFLYQVSTHEQSESTHGQSAPSTGGRQGSHYDQAQDSSRHSASQEGQDTIRGHPGPSRGGRQGSHQEQSVDRSGHSGSHHSHTTSQGRSDASRGQSGSRSASRKTYDKEQSGDGSRHSGSHHHEASSWADSSRHSLVGQGQSSGPRTSRPRGSSVSQDSDSEGHSEDSERRSGSASRNHHGSAQEQSRDGSRHPRSHHEDRAGHGHSAESSRQSGTHHAENSSGGQAASSHEQARSSAGERHGSHHQQSADSSRHSGIGHGQASSAVRDSGHRGSSGSQASDSEGHSEDSDTQSVSAHGQAGPHQQSHQESTRGRSAGRSGRSGSFLYQVSTHEQSESAHGRTGTSTGGRQGSHHKQARDSSRHSTSQEGQDTIHGHPGSSSGGRQGSHYEQLVDRSGHSGSHHSHTTSQGRSDASHGHSGSRSASRQTRNDEQSGDGSRHSGSRHHEASSRADSSGHSQVGQGQSEGPRTSRNWGSSFSQDSDSQGHSEDSERWSGSASRNHHGSAQEQLRDGSRHPRSHQEDRAGHGHSADSSRQSGTRHTQTSSGGQAASSHEQARSSAGERHGSHHQQSADSSRHSGIGHGQASSAVRDSGHRGYSGSQASDNEGHSEDSDTQSVSAHGQAGSHQQSHQESARGRSGETSGHSGSFLYQVSTHEQSESSHGWTGPSTRGRQGSRHEQAQDSSRHSASQDGQDTIRGHPGSSRGGRQGYHHEHSVDSSGHSGSHHSHTTSQGRSDASRGQSGSRSASRTTRNEEQSGDGSRHSGSRHHEASTHADISRHSQAVQGQSEGSRRSRRQGSSVSQDSDSEGHSEDSERWSGSASRNHHGSAQEQLRDGSRHPRSHQEDRAGHGHSADSSRQSGTRHTQTSSGGQAASSHEQARSSAGERHGSHHQQSADSSRHSGIGHGQASSAVRDSGHRGYSGSQASDNEGHSEDSDTQSVSAHGQAGSHQQSHQESARGRSGETSGHSGSFLYQVSTHEQSESSHGWTGPSTRGRQGSRHEQAQDSSRHSASQYGQDTIRGHPGSSRGGRQGYHHEHSVDSSGHSGSHHSHTTSQGRSDASRGQSGSRSASRTTRNEEQSGDSSRHSVSRHHEASTHADISRHSQAVQGQSEGSRRSRRQGSSVSQDSDSEGHSEDSERWSGSASRNHRGSVQEQSRHGSRHPRSHHEDRAGHGHSADRSRQSGTRHAETSSGGQAASSHEQARSSPGERHGSRHQQSADSSRHSGIPRGQASSAVRDSRHWGSSGSQASDSEGHSEESDTQSVSGHGQAGPHQQSHQESARDRSGGRSGRSGSFLYQVSTHEQSESAHGRTRTSTGRRQGSHHEQARDSSRHSASQEGQDTIRGHPGSSRRGRQGSHYEQSVDRSGHSGSHHSHTTSQGRSDASRGQSGSRSASRQTRNDEQSGDGSRHSWSHHHEASTQADSSRHSQSGQGQSAGPRTSRNQGSSVSQDSDSQGHSEDSERWSGSASRNHRGSAQEQSRDGSRHPTSHHEDRAGHGHSAESSRQSGTHHAENSSGGQAASSHEQARSSAGERHGSHHQQSADSSRHSGIGHGQASSAVRDSGHRGSSGSQASDSEGHSEDSDTQSVSAHGQAGPHQQSHQESTRGRSAGRSGRSGSFLYQVSTHEQSESAHGRAGPSTGGRQGSRHEQARDSSRHSASQEGQDTIRGHPGSRRGGRQGSYHEQSVDRSGHSGSHHSHTTSQGRSDASHGQSGSRSASRETRNEEQSGDGSRHSGSRHHEASTQADSSRHSQSGQGESAGSRRSRRQGSSVSQDSDSEAYPEDSERRSESASRNHHGSSREQSRDGSRHPGSSHRDTASHVQSSPVQSDSSTAKEHGHFSSLSQDSAYHSGIQSRGSPHSSSSYHYQSEGTERQKGQSGLVWRHGSYGSADYDYGESGFRHSQHGSVSYNSNPVVFKERSDICKASAFGKDHPRYYATYINKDPGLCGHSSDISKQLGFSQSQRYYYYE

SEQ ID NO: 710 - protein, 1873 aa, human; identical to SEQ ID NO: 696

SEQ ID NO: 711 - protein, 1147 aa, human [sequence omitted]

SEQ ID NO: 712 - protein, 585 aa, human
MSQQHTLPVTLSPALSQELLKTVPPPVNTHQEQMKQPTPLPPPCQKVPVELPVEVPSKQEEKHMTAVKGLPEQECEQQQKEPQEQELQQQHWEQHEEYQKAENPEQQLKQEKTQRDQQLNKQLEEEKKLLDQQLDQELVKRDEQLGMKKEQLLELPEQQEGHLKHLEQQEGQLKHPEQQEGQLELPEQQEGQLELPEQQEGQLELPEQQEGQLELPEQQEGQLELPQQQEGQLELSEQQEGQLELSEQQEGQLELSEQQEGQLKHLEHQEGQLEVPEEQMGQLKYLEQQEGQLKHLDQQEKQPELPEQQMGQLKHLEQQEGQPKHLEQQEGQLEQLEEQEGQLKHLEQQEGQLEHLEHQEGQLGLPEQQVLQLKQLEKQQGQPKHLEEEEGQLKHLVQQEGQLKHLVQQEGQLEQQERQVEHLEQQVGQLKHLEEQEGQLKHLEQQQGQLEVPEQQVGQPKNLEQEEKQLELPEQQEGQVKHLEKQEAQLELPEQQVGQPKHLEQQEKHLEHPEQQDGQLKHLEQQEGQLKDLEQQKGQLEQPVFAPAPGQVQDIQPALPTKGEVLLPVEHQQQKQEVQWPPKHK

SEQ ID NO: 713 - protein, 381 aa, human
MPFGNTHNKFKLNYKPEEEYPDLSKHNNHMAKVLTLELYKKLRDKETPSGFTVDDVIQTGVDNPGHPFIMTVGCVAGDEESYEVFKELFDPIISDRHGGYKPTDKHKTDLNHENLKGGDDLDPNYVLSSRVRTGRSIKGYTLPPHCSRGERRAVEKLSVEALNSLTGEFKGKYYPLKSMTEKEQQQLIDDHFLFDKPVSPLLLASGMARDWPDARGIWHNDNKSFLVWVNEEDHLRVISMEKGGNMKEVFRRFCVGLQKIEEIFKKAGHPFMWNQHLGYVLTCPSNLGTGLRGGVHVKLAHLSKHPKFEEILTRLRLQKRGTGGVDTAAVGSVFDVSNADRLGSSEVEQVQLVVDGVKLMVEMEKKLEKGQSIDDMIPAQK

SEQ ID NO: 714 - protein, 503 aa, human
MATTVTCTRFTDEYQLYEDIGKGAFSVVRRCVKLCTGHEYAAKIINTKKLSARDHQKLEREARICRLLKHSNIVRLHDSISEEGFHYLVFDLVTGGELFEDIVAREYYSEADASHCIQQILEAVLHCHQMGVVHRDLKPENLLLASKCKGAAVKLADFGLAIEVQGDQQAWFGFAGTPGYLSPEVLRKEAYGKPVDIWACGVILYILLVGYPPFWDEDQHKLYQQIKAGAYDFPSPEWDTVTPEAKNLINQMLTINPAKRITAHEALKHPWVCQRSTVASMMHRQETVECLKKFNARRKLKGAILTTMLATRNFSAAKSLLNKKADGVKPQTNSTKNSAAATSPKGTLPPAALESSDSANTTIEDEDAKARKQEIIKTTEQLIEAVNNGDFEAYAKICDPGLTSFEPEALGNLVEGMDFHRFYFENLLAKNSKPIHTTILNPHVHVIGEDAACIAYIRLTQYIDGQGRPRTSQSEETRVWHRRDGKWQNVHFHCSGAPVAPLQ

SEQ ID NO: 715 - protein, 455 aa, human
MGLSTVPDLLLPLVLLELLVGIYPSGVIGLVPHLGDREKRDSVCPQGKYIHPQNNSICCTKCHKGTYLYNDCPGPGQDTDCRECESGSFTASENHLRHCLSCSKCRKEMGQVEISSCTVDRDTVCGCRKNQYRHYWSENLFQCFNCSLCLNGTVHLSCQEKQNTVCTCHAGFFLRENECVSCSNCKKSLECTKLCLPQIENVKGTEDSGTTVLLPLVIFFGLCLLSLLFIGLMYRYQRWKSKLYSIVCGKSTPEKEGELEGTTTKPLAPNPSFSPTPGFTPTLGFSPVPSSTFTSSSTYTPGDCPNFAAPRREVAPPYQGADPILATALASDPIPNPLQKWEDSAHKPQSLDTDDPATLYAVVENVPPLRWKEFVRRLGLSDHEIDRLELQNGRCLREAQYSMLATWRRRTPRREATLELLGRVLRDMDLLGCLEDIEEALCGPAALPPAPSLLR

SEQ ID NO: 716 - protein, 676 aa, human
MAPFLRIAFNSYELGSLQAEDEANQPFCAVKMKEALSTERGKTLVQKKPTMYPEWKSTFDAHIYEGRVIQIVLMRAAEEPVSEVTVGVSVLAERCKKNNGKAEFWLDLQPQAKVLMSVQYFLEDVDCKQSMRSEDEAKFPTMNRRGAIKQAKIHYIKNHEFIATFFGQPTFCSVCKDFVWGLNKQGYKCRQCNAAIHKKCIDKIIGRCTGTAANSRDTIFQKERFNIDMPHRFKVHNYMSPTFCDHCGSLLWGLVKQGLKCEDCGMNVHHKCREKVANLCGINQKLLAEALNQVTQRASRRSDSASSEPVGIYQGFEKKTGVAGEDMQDNSGTYGKIWEGSSKCNINNFIFHKVLGKGSFGKVLLGELKGRGEYFAIKALKKDVVLIDDDVECTMVEKRVLTLAAENPFLTHLICTFQTKDHLFFVMEFLNGGDLMYHIQDKGRFELYRATFYAAEIMCGLQFLHSKGIIYRDLKLDNVLLDRDGHIKIADFGMCKENIFGESRASTFCGTPDYIAPEILQGLKYTFSVDWWSFGVLLYEMLIGQSPFHGDDEDELFESIRVDTPHYPRWITKESKDILEKLFEREPTKRLGVTGNIKIHPFFKTINWTLLEKRRLEPPFRPKVKSPRDYSNFDQEFLNEKARLSYSDKNLIDSMDQSAFAGFSFVNPKFEHLLED

SEQ ID NO: 717 - protein, 463 aa, human
MGKEKTHINIVVIGHVDSGKSTTTGHLIYKCGGIDKRTIEKFEKEAAEMGKGSFKYAWVLDKLKAERERGITIDISLWKFETTKYYITIIDAPGHRDFIKNMITGTSQADCAVLIVAAGVGEFEAGISKNGQTREHALLAYTLGVKQLIVGVNKMDSTEPAYSEKRYDEIVKEVSAYIKKIGYNPATVPFVPISGWHGDNMLEPSPNMPWFKGWKVERKEGNASGVSLLEALDTILPPTRPTDKPLRLPLQDVYKIGGIGTVPVGRVETGILRPGMVVTFAPVNITTEVKSVEMHHEALSEALPGDNVGFNVKNVSVKDIRRGNVCGDSKSDPPQEAAQFTSQVIILNHPGQISAGYSPVIDCHTAHIACKFAELKEKIDRRSGKKLEDNPKSLKSGDAAIVEMVPGKPMCVESFSQYPPLGRFAVRDMRQTVAVGVIKNVEKKSGGAGKVTKSAQKAQKAGK

SEQ ID NO: 718 - protein, 517 aa, human [sequence omitted]

SEQ ID NO: 719 - protein, 386 aa, human
MRAAPLLLARAASLSLGFLFLLFFWLDRSVLAKELKFVTLVFRHGDRSPIDTFPTDPIKESSWPQGFGQLTQLGMEQHYELGEYIRKRYRKFLNESYKHEQVYIRSTDVDRTLMSAMTNLAALFPPEGVSIWNPILLWQPIPVHTVPLSEDQLLYLPFRNCPRFQELESETLKSEEFQKRLHPYKDFIATLGKLSGLHGQDLFGIWSKVYDPLYCESVHNFTLPSWATEDTMTKLRELSELSLLSLYGIHKQKEKSRLQGGVLVNEILNHMKRATQIPSYKKLIMYSAHDTTVSGLQMALDVYNGLLPPYASCHLTELYFEKGEYFVEMYYRNETQHEPYPLMLPGCSPSCPLERFAELVGPVIPQDWSTECMTTNSHQGTEDSTD

SEQ ID NO: 720 - protein, 747 aa, human; identical to SEQ ID NO: 636

SEQ ID NO: 721 - protein, 747 aa, human; identical to SEQ ID NO: 636

SEQ ID NO: 722 - protein, 175 aa, human
MDIAIHHPWIRRPFFPFHSPSRLFDQFFGEHLLESDLFPTSTSLSPFYLRPPSFLRAPSWFDTGLSEMRLEKDRFSVNLDVKHFSPEELKVKVLGDVIEVHGKHEERQDEHGFISREFHRKYRIPADVDPLTITSSLSSDGVLTVNGPRKQVSGPERTIPITREEKPAVTAAPKK

SEQ ID NO: 723 - protein, 503 aa, human; identical to SEQ ID NO: 714

SEQ ID NO: 724 - protein, 36 aa, human
ELEEAEERADIAESQVNKLRAKSRDIGAKQKMHDEE

SEQ ID NO: 725 - protein, 353 aa, human
MNGDQNSDVYAQEKQDFVQHFSQIVRVLTEDEMGHPEIGDAIARLKEVLEYNAIGGKYNRGLTVVVAFRELVEPRKQDADSLQRAWTVGWCVELLQAFFLVADDIMDSSLTRRGQICWYQKPGVGLDAINDANLLEACIYRLLKLYCREQPYYLNLIELFLQSSYQTEIGQTLDLLTAPQGNVDLVRFTEKRYKSIVKYKTAFYSFYLPIAAAMYMAGIDGEKEHANAKKILLEMGEFFQIQDDYLDLFGDPSVTGKIGTDIQDNKCSWLVVQCLQRATPEQYQILKENYGQKEAEKVARVKALYEELDLPAVFLQYEEDSYSHIMALIEQYAAPLPPAVFLGLARKIYKRRK

SEQ ID NO: 726 - protein, 927 aa, human
SRFSSSSSTVACPGRGRARPVCWKRSEMATCAVEVFGLLEDEENSRIVRVRVIAGIGLAKKDILGASDPYVRVTLYDPMNGVLTSVQTKTIKKSLNPKWNEEILFRVHPQQHRLLFEVFDENRLTRDDFLGQVDVPLYPLPTENPRLERPYTFKDFVLHPRSHKSRVKGYLRLKMTYLPKTSGSEDDNAEQAEELEPGWVVLDQPDAACHLQQQQEPSPLPPGWEERQDILGRTYYVNHESRRTQWKRPTPQDNLTDAENGNIQLQAQRAFTTRRQISEETESVDNQESSENWEIIREDEATMYSSQAFPSPPPSSNLDVPTHLAEELNARLTIFGNSAVSQPASSSNHSSRRGSLQAYTFEEQPTLPVLLPTSSGLPPGWEEKQDERGRSYYVDHNSRTTTWTKPTVQATVETSQLTSSQSSAGPQSQASTSDSGQQVTQPSEIEQGFLPKGWEVRHAPNGRPFFIDHNTKTTTWEDPRLKIPAHLRGKTSLDTSNDLGPLPPGWEERTHTDGRIFYINHNIKRTQWEDPRLENVAITGPAVPYSRDYKRKYEFFRRKLKKQNDIPNKFEMKLRRATVLEDSYRRIMGVKRADFLKARLWIEFDGEKGLDYGGVAREWFFLISKEMFNPYYGLFEYSATDNYTLQINPNSGLCNEDHLSYFKFIGRVAGMAVYHGKLLDGFFIRPFYKMMLHKPITLHDMESVDSEYYNSLRWILENDPTELDLRFIIDEELFGQTHQHELKNGGSEIVVTNKNKKEYIYLVIQWRFVNRIQKQMAAFKEGFFELIPQDLIKIFDENELELLMCGLGDVDVNDWREHTKYKNGYSANHQVIQWFWKAVLMMDSEKRIRLLQFVTGTSRVPMNGFAELYGSNGPQSFTVEQWGTPEKLPRAHTCFNRLDLPPYESFEELWDKLQMAIENTQGFDGVD

SEQ ID NO: 727 - protein, 381 aa, human
MWRSLGLALALCLLPSGGTESQDQSSLCKQPPAWSIRDQDPMLNSNGSVTVVALLQASCYLCIIEASKLEDLRVKLKKEGYSNISYIVVNHQGISSRLKYTHLKNKVSEHIPVYQQEENQTDVWTLLNGSKDDFLIYDRCGRLVYHLGLPFSFLTFPYVEEAIKIAYCEKKCGNCSLTTLKDEDFCKRVSLATVDKTVETPSPHYHHEHHHNHGHQHLGSSELSENQQPGAPNAPTHPAPPGLHHHHKHKGQHRQGHPENRDMPASEDLQDLQKKLCRKRCINQLLCKLPTDSELAPRSCCCHCRHLIFEKTGSAITCQCKENLPSLCSCQGLRAEENITESCQCRLPPAACQISQQLIPTEASASCRCKNQAKKCECPSN

SEQ ID NO: 728 - protein, 295 aa, human
MEHQLLCCEVETIRRAYPDANLLNDRVLRAMLKAEETCAPSVSYFKCVQKEVLPSMRKIVATWMLEVCEEQKCEEEVFPLAMNYLDRFLSLEPVKKSRLQLLGATCMFVASKMKETIPLTAEKLCIYTDNSIRPEELLQMELLLVNKLKWNLAAMTPHDFIEHFLSKMPEAEENKQIIRKHAQTFVALCATDVKFISNPPSMVAAGSVVAAVQGLNLRSPNNFLSYYRLTRFLSRVIKCDPDCLRACQEQIEALLESSLRQAQQNMDPKAAEEEEEEEEEVDLACTPTDVRDVDI

SEQ ID NO: 729 - protein, 178 aa, human
MSRLSRSLLWAATCLGVLCVLSADKNTTQHPNVTTLAPISNVTSAPVTSLPLVTTPAPETCEGRNSCVSCFNVSVVNTTCFWIECKDESYCSHNSTVSDCQVGNTTDFCSVSTATPVPTANSTGTTNNTVTPTSQPVRKSTFDAASFIGGIVLVLGVQAVIFFLYKFCKSKERNYHTL

SEQ ID NO: 730 - protein, 88 aa, human; identical to SEQ ID NO: 653

SEQ ID NO: 731 - protein, 210 aa, human
MAEDKETKHGGHKNGRKGGLSGTSFFTWFMVIALLGVWTSVAVVWFDLVDYEEVLGKLGIYDADGDGDFDVDDAKVLLEGPSGVAKRKTKAKVKELTKEELKKEKEKPESRKESKNEERKKGKKEDVRKDKKIADADLSRKESPKGKKDREKEKVDLEKSAKTKENRKKSTNMKDVSSKMASRDKDDRKESRSSTRYAHLTKGNTQKRNG

SEQ ID NO: 732 - protein, 75 aa, human
DKIEKSQEAYLLAFEHYVNHRKHNIPHFWPKLLMKVTDLRMIGACHASRFLHMKVECPTELFPPLFLEVFEDQEV

SEQ ID NO: 733 - protein, 1018 aa, human
RYRLAWLLHPALPSTFRSVLGARLPPPERLCGFQKKTYSKMNNPAIKRIGNHITKSPEDKREYRGLELANGIKVLLMSDPTTDKSSAALDVHIGSLSDPPNIAGLSHFCEHMLFLGTKKYPKENEYSQFLSEHAGSSNAFTSGEHTNYYFDVSHEHLEGALDRFAQFFLCPLFDESCKDREVNAVDSEHEKNVMNDAWRLFQLEKATGNPKHPFSKFGTGNKYTLETRPNQEGIDVRQELLKFHSAYYSSNLMAVCVLGRESLDDLTNLVVKLFSEVENKNVPLPEFPEHPFQEEHLKQLYKIVPIKDIRNLYVTFPIPDLQKYYKSNPGHYLGHLIGHEGPGSLLSELKSKGWVNTLVGGQKEGARGFMFFIINVDLTEEGLLHVEDIILHMFQYIQKLRAEGPQEWVFQECKDLNAVAFRFKDKERPRGYTSKIAGILHYYPLEEVLTAEYLLEEFRPDLIEMVLDKLRPENVRVAIVSKSFEGKTDRTEEWYGTQYKQEAIPDEVIKKWQNADLNGKFKLPTKNEFIPTNFEILPLEKEATPYPALIKDTVMSKLWFKQDDKKKKPKACLNFEFFSPFAYVDPLHCNMAYLYLELLKDSLNEYAYAAELAGLSYDLQNTIYGMYLSVKGYNDKQPILLKKIIEKMATFEIDEKRFEIIKEAYMRSLNNFRAEQPHQHAMYYLRLLMTEVAWTKDELKEALDDVTLPRLKAFIPQLLSRLHIEALLHGNITKQAALGIMQMVEDTLIEHAHTKPLLPSQLVRYREVQLPDRGWFVYQQRNEVHNNCGIEIYYQTDMQSTSENMFLELFCQIISEPCFNTLRTKEQLGYIVFSGPRRANGIQSLRFIIQSEKPPHYLESRVEAFLITMEKSIEDMTEEAFQKHIQALAIRRLDKPKKLSAECAKYWGEIISQQYNFDRDNTEVAYLKTLTKEDIIKFYKEMLAVDAPRRHKVSVHVLAREMDSCPVVGEFPCQNDINLSQAPALPQPEVIQNMTEFKRGLPLFPLVKPHINFMAAKL

SEQ ID NO: 734 - protein, 109 aa, human
SMTDLLNAEDIKKAVGAFSATDSFDHKKFFQMVGLKKKSADDVKKVFHMLDKDKSGFIEEDELGFILKGFSPDARDLSAKETKMLMAAGDKDGDGKIGVDEFSTLVAES

SEQ ID NO: 735 - protein, 1109 aa, human
MGSKGVYQYHWQSHNVKHSGVDDMVLLSKITENSIVENLKKRYMDDYIFTYIGSVLISVNPFKQMPYFGEKEIEMYQGAAQYENPPHIYALADNMYRNMIIDRENQCVIISGESGAGKTVAAKYIMSYISRVSGGGTKVQHVKDIILQSNPLLEAFGNAKTVRNNNSSRFGKYFEIQFSPGGEPDGGKISNFLLEKSRVVMRNPGERSFHIFYQLIEGASAEQKHSLGITSMDYYYYLSLSGSYKVDDIDDRREFQETLHAMNVIGIFAEEQTLVLQIVAGILHLGNISFKEVGNYAAVESEEFLAFPAYLLGINQDRLKEKLTSRQMDSKWGGKSESIHVTLNVEQACYTRDALAKALHARVFDFLVDSINKAMEKDHEEYNIGVLDIYGFEIFQKNGFEQFCINFVNEKLQQIFIELTLKAEQEEYVQEGIRWTPIEYFNNKIVCDLIENKVNPPGIMSILDDVCATMHAVGEGADQTLLQKLQMQIGSHEHFNSWNQGFIIHHYAGKVSYDMDGFCERNRDVLFMDLIELMQSSELPFIKSLFPENLQADKKGRPTTAGSKIKKQANDLVSTLMKCTPHYIRCIKPNETKKPRDWEESRVKHQVEYLGLKENIRVRRAGYAYRRIFQKFLQRYAILTKATWPSWQGEEKQGVLHLLQSVNMDSDQFQLGRSKVFIKAPESLFLLEEMRERKYDGYARVIQKSWRKFVARKKYVQMREEASDLLLNKKERRRNSINRNFIGDYIGMEEHPELQQFVGKREKIDFADTVTKYDRRFKGVKRDLLLTPKCLYLIGREKVKQGPDKGLVKEVLKRKIEIERILSVSLSTMQDDIFILHEQEYDSLLESVFKTEFLSLLAKRYEEKTQKQLPLKFSNTLELKLKKENWGPGVQGAGSRQVQFHQGFGDLAVLKPSNKVLQVSIGPGLPKNSRPTRRNTTQNTGYSSGTQNANYPVRAAPPPPGYHQNGVIRNQYVPYPHAPGSQRSIQKSLYTSMARPPLPRQQSTSSDRVSQTPESLDFLKVPDQGAAGVRRQTTSRPPPAGGRPKPQPKPKPQVPQCKALYAYDAQDTDELSFNANDIIDIIKEDPSGWWTGRLRGKPGLFPNNYVTKI

SEQ ID NO: 736 - protein, 272 aa, human
MVLLTAVLLLLAAYAGPAQSLGSFVHCEPCDEKALSMCPPSPLGCELVKEPGCGCCMTCALAEGQSCGVYTERCAQGLRCLPRQDEEKPLHALLHGRGVCLNEKSYREQVKIERDSREHEEPTTSEMAEETYSPKIFRPKHTRISELKAEAVKKDRRKKLTQSKFVGGAENTAHPRIISAPEMRQESEQGPCRRHMEASLQELKASPRMVPRAVYLPNCDRKGFYKRKQCKPSRGRKRGICWCVDKYGMKLPGMEYVDGDFQCHTFDSSNVE

SEQ ID NO: 737 - protein, 295 aa, human
MIEVLTTTDSQKLLHQLNALLEQESRCQPKVCGLRLIESAHDNGLRMTARLRDFEVKDLLSLTQFFGFDTETFSLAVNLLDRFLSKMKVQPKHLGCVGLSCFYLAVKSIEEERNVPLATDLIRISQYRFTVSDLMRMEKIVLEKVCWKVKATTAFQFLQLYYSLLQENLPLERRNSINFERLEAQLKACHCRIIFSKAKPSVLALSIIALEIQAQKCVELTEGIECLQKHSKINGRDLTFWQELVSKCLTEYSSNKCSKPNVQKLKWIVSGRTARQLKHSYYRITHLPTIPEMVP

SEQ ID NO: 738 - protein, 359 aa, human
MKATIILLLLAQVSWAGPFQQRGLFDFMLEDEASGIGPEVPDDRDFEPSLGPVCPFRCQCHLRVVQCSDLGLDKVPKDLPPDTTLLDLQNNKITEIKDGDFKNLKNLHALILVNNKISKVSPGAFTPLVKLERLYLSKNQLKELPEKMPKTLQELRAHENEITKVRKVTFNGLNQMIVIELGTNPLKSSGIENGAFQGMKKLSYIRIADTNITSIPQGLPPSLTELHLDGNKISRVDAASLKGLNNLAKLGLSFNSISAVDNGSLANTPHLRELHLDNNKLTRVPGGLAEHKYIQVVYLHNNNISVVGSSDFCPPGHNTKKASYSGVSLFSNPVQYWEIQPSTFRCVYVRSAIQLGNYK

SEQ ID NO: 739 - protein, 295 aa, human; identical to SEQ ID NO: 737

SEQ ID NO: 740 - protein, 767 aa, human
MSFDPNLLHNNGHNGYPNGTSAALRETGVIEKLLTSYGFIQCSERQARLFFHCSQYNGNLQDLKVGDDVEFEVSSDRRTGKPIAVKLVKIKQEILPEERMNGQEVFYLTYTPEDVEGNVQLETGDKINFVIDNNKHTGAVSARNIMLLKKKQARCQGVVCAMKEAFGFIERGDVVKEIFFHYSEFKGDLETLQPGDDVEFTIKDRNGKEVATDVRLLPQGTVIFEDISIEHFEGTVTKVIPKVPSKNQNDPLPGRIKVDFVIPKELPFGDKDTKSKVTLLEGDHVRFNISTDRRDKLERATNIEVLSNTFQFTNEAREMGVIAAMRDGFGFIKCVDRDVRMFFHFSEILDGNQLHIADEVEFTVVPDMLSAQRNHAIRIKKLPKGTVSFHSHSDHRFLGTVEKEATFSNPKTTSPNKGKEKEAEDGIIAYDDCGVKLTIAFQAKDVEGSTSPQIGDKVEFSISDKQRPGQQVATCVRLLGRNSNSKRLLGYVATLKDNFGFIETANHDKEIFFHYSEFSGDVDSLELGDMVEYSLSKGKGNKVSAEKVNKTHSVNGITEEADPTIYSGKVIRPLRSVDPTQTEYQGMIEIVEEGDMKGEVYPFGIVGMANKGDCLQKGESVKFQLCVLGQNAQTMAYNITPLRRATVECVKDQFGFINYEVGDSKKLFFHVKEVQDGIELQAGDEVEFSVILNQRTGKCSACNVWRVCEGPKAVAAPRPDRLVNRLKNITLDDASAPRLMVLRQPRGPDNSMGFGAERKIRQAGVID

SEQ ID NO: 741 - protein, 553 aa, human
MLSVRVAAAVVRALPRRAGLVSRNALGSSFIAARNFHASNTHLQKTGTAEMSSILEERILGADTSVDLEETGRVLSIGDGIARVHGLRNVQAEEMVEFSSGLKGMSLNLEPDNVGVVVFGNDKLIKEGDIVKRTGAIVDVPVGEELLGRVVDALGNAIDGKGPIGSKTRRRVGLKAPGIIPRISVREPMQTGIKAVDSLVPIGRGQRELIIGDRQTGKTSIAIDTIINQKRFNDGSDEKKKLYCIYVAIGQKRSTVAQLVKRLTDADAMKYTIVVSATASDAAPLQYLAPYSGCSMGEYFRDNGKHALIIYDDLSKQAVAYRQMSLLLRRPPGREAYPGDVFYLHSRLLERAAKMNDAFGGGSLTALPVIETQAGDVSAYIPTNVISITDGQIFLETELFYKGIRPAINVGLSVSRVGSAAQTRAMKQVAGTMKLELAQYREVAAFAQFGSDLDAATQQLLSRGVRLTELLKQGQYSPMAIEEQVAVIYAGVRGYLDKLEPSKITKFENAFLSHVVSQHQALLGTIRADGKISEQSDAKLKEIVTNFLAGFEA

SEQ ID NO: 742 - protein, 175 aa, human; identical to SEQ ID NO: 722

SEQ ID NO: 743 - protein, 64 aa, human
MVNSRFFGVCSRRTTGVGVCCENGECRGTPLTEKRALGNDCERVNELMTKIRCGGPTAQMVMPF

SEQ ID NO: 744 - protein, 155 aa, human
GERGSPGGPGAAGFPGARGLPGPPGSNGNPGPPGPSGSPGKDGPPGPAGNTGAPGSPGVSGPKGDAGQPGEKGSPGAQGPPGAPGPLGIAGITGARGLAGPPGMPGPRGSPGPQGVKGESGKPGANGLSGERGPPGPQGLPGLAGTAGEPGRDGN

SEQ ID NO: 745 - protein, 1940 aa, human; identical to SEQ ID NO: 641

SEQ ID NO: 746 - protein, 517 aa, human
MEGPVLTLGLLAALAVCGSWGLNEEERLIRHLFQEKGYNKELRPVAHKEESVDVALALTLSNLISLKEVEETLTTNVWIEHGWTDNRLKWNAEEFGNISVLRLPPDMVWLPEIVLENNNDGSFQISYSCNVLVYHYGFVYWLPPAIFRSSCPISVTYFPFDWQNCSLKFSSLKYTAKEITLSLKQDAKENRTYPVEWIIIDPEGFTENGEWEIVHRPARVNVDPRAPLDSPSRQDITFYLIIRRKPLFYIINILVPCVLISFMVNLVFYLPADSGEKTSVAISVLLAQSVFLLLISKRLPATSMAIPLIGKFLLFGMVLVTMVVVICVIVLNIHFRTPSTHVLSEGVKKLFLETLPELLHMSRPAEDGPSPGALVRRSSSLGYISKAEEYFLLKSRSDLMFEKQSERHGLARRLTTARRPPASSEQAQQELFNELKPAVDGANFIVNHMRDQNNYNEEKDSWNRVARTVDRLCLFVVTPVMVVGTAWIFLQGVYNQPPPQPFPGDPYSYNVQDKRFI

SEQ ID NO: 747 - protein, 227 aa, human
PVKGGTKCIKYLLFGFNFIFWLAGIAVLAIGLWLRFDSQTKSIFEQETNNNNSSFYTGVYILIGAGALMMLVGFLGCCGAVQESQCMLGLFFGFLLVIFAIEIAAAIWGYSHKDEVIKEVQEFYKDTYNKLKTKDEPQRETLKAIHYALNCCGLAGGVEQFISDICPKKDVLETFTVKSCPDAIKEVFDNKFHIIGAVGIGIAVVMIFGMIFSMILCCAIRRNREMV

SEQ ID NO: 748 - protein, 222 aa, human
MAGKPKLHYFNGRGRMEPIRWLLAAAGVEFEEKFIGSAEDLGKLRNDGSLMFQQVPMVEIDGMKLVQTRAILNYIASKYNLYGKDIKERALIDMYTEGMADLNEMILLLPLCRPEEKDAKIALIKEKTKSRYFPAFEKVLQSHGQDYLVGNKLSRADISLVELLYYVEELDSSLISNFPLLKALKTRISNLPTVKKFLQPGSPRKPPADAKALEEARKIFRF

SEQ ID NO: 749 - protein, 377 aa, human; identical to SEQ ID NO: 335

SEQ ID NO: 750 - protein, 175 aa, human
FATSESIFSTCKKLEESLTVEICGKPLDLSNLSLEGIAVLNIPSMHGGSNLWGDTRRPHGDIYGINQALGATAKVITDPDILKTCVPDLSDKRLEVVGLEGAIEMGQIYTKLKNAGRRLAKCSEITFHTTKTLPMQIDVEPWMQTPCTIKITHKNQMPMLMGPPPRSTNFFGFLS

SEQ ID NO: 751 - protein, 48 aa, human
KIGDFGFSNEFTFGNKLDTFCGSPPYAAPELFQGKKYDGPEVDVWSCG

SEQ ID NO: 752 - protein, 35 aa, human
PWMQTPCTIKITHKNQMPMLMGPPPRSTNFFGFLS

SEQ ID NO: 753 - protein, 562 aa, human; identical to SEQ ID NO: 674

SEQ ID NO: 754 - protein, 1515 aa, human
IYATGALAKAVYERMFNWMVTRINATLETKQPRQYFIGVLDIAGFEIFDFNSFEQLCINFTNEKLQQFFNHHMFVLEQEEYKKEGIEWTFIDFGMDLQACIDLIEKPMGIMSILEEECMFPKATDMTFKAKLFDNHLGKSANFQKPRNIKGKPEAHFSLIHYAGIVDYNIIGWLQKNKDPLNETVVGLYQKSSLKLLSTLFANYAGADAPIEKGKGKAKKGSSFQTVSALHRENLNKLMTNLRSTHPHFVRCIIPNETKSPGVMDNPLVMHQLRCNGVLEGIRICRKGFPNRILYGDFRQRYRILNPAAIPEGQFIDSRKGAEKLLSSLDIDHNQYKFGHTKVFFKAGLLGLLEEMRDERLSRIITRIQAQSRGVLARMEYKKLLERRDSLLVIQWNIRAFMGVKNWPWMKLYFKIKPLLKSAEREKEMASMKEEFTRLKEALEKSEARRKELEEKMVSLLQEKNDLQLQVQAEQDNLADAEERCDQLIKNKIQLEAKVKEMNERLEDEEEMNAELTAKKRKLEDECSELKRDIDDLELTLAKVEKEKHATENKVKNLTEEMAGLDEIIAKLTKEKKALQEAHQQALDDLQAEEDKVNTLTKAKVKLEQQVDDLEGSLEQEKKVRMDLERAKRKLEGDLKLTQESIMDLENDKQQLDERLKKKDFELNALNARIEDEQALGSQLQKKLKELQARIEELEEELESERTARAKVEKLRSDLSRELEEISERLEEAGGATSVQIEMNKKREAEFQKMRRDLEEATLQHEATAAALRKKHADSVAELGEQIDNLQRVKQKLEKEKSEFKLELDDVTSNMEQIIKAKANLEKMCRTLEDQMNEHRSKAEETQRSVNDLTSQRAKLQTENGELSRQLDEKEALISQLTRGKLTYTQQLEDLKRQLEEEVKAKNALAHALQSARHDCDLLREQYEEETEAKAELQRVLSKANSEVAQWRTKYETDAIQRTEELEEAKKKLAQRLQEAEEAVEAVNAKCSSLEKTKHRLQNEIEDLMVDVERSNAAAAALDKKQRNFDKILAEWKQKYEESQSELESSQKEARSLSTELFKLKNAYEESLEHLETFKRENKNLQEEISDLTEQLGSSGKTIHELEKVRKQLEAEKMELQSALEEAEASLEHEEGKILRAQLEFNQIKAEIERKLAEKDEEMEQAKRNHLRVVDSLQTSLDAETRSRNEALRVKKKMEGDLNEMEIQLSHANRMAAEAQKQVKSLQSLLKDTQIQLDDAVRANDDLKENIAIVERRNNLLQAELEELRAVVEQTERSRKLAEQELIETSERVQLLHSQNTSLINQKKKMDADLSQLQTEVEEAVQECRNAEEKAKKAITDAAMMAEELKKEQDTSAHLERMKKNMEQTIKDLQHRLDEAEQIALKGGKKQLQKLEARVRELENELEAEQKRNAESVKGMRKSERRIKELTYQTEEDRKNLLRLQDLVDKLQLKVKAYKRQAEEAEEQANTNLSKFRKVQHELDEAEERADIAESQVNKLRAKSRDIGTKGLNEE

SEQ ID NO: 755 - protein, 353 aa, human
MDYKSSLIQDGNPMENLEKQLICPICLEMFTKPVVILPCQHNLCRKCANDIFQAANPYWTSRGSSVSMSGGRFRCPTCRHEVIMDRHGVYGLQRNLLVENIIDIYKQECSSRPLQKGSHPMCKEHEDEKINIYCLTCEVPTCSMCKVFGIHKACEVAPLQSVFQGQKTELNNCISMLVAGNDRVQTIITQLEDSRRVTKENSHQVKEELSQKFDTLYAILDEKKSELLQRITQEQEKKLSFIEALIQQYQEQLDKSTKLVETAIQSLDEPGGATFLLTAKQLIKSIVEASKGCQLGKTEQGFENMDFFTLDLEHIADALRAIDFGTDEEEEEFIEEEDQEEEESTEGKEEGHQ

SEQ ID NO: 756 - protein, 424 aa, human
MSDHGDVSLPPEDRVRALSQLGSAVEVNEDIPPRRYFRSGVEIIRMASIYSEEGNIEHAFILYNKYITLFIEKLPKHRDYKSAVIPEKKDTVKKLKEIAFPKAEELKAELLKRYTKEYTEYNEEKKKEAEELARNMAIQQELEKEKQRVAQQKQQQLEQEQFHAFEEMIRNQELEKERLKIVQEFGKVDPGLGGPLVPDLEKPSLDVFPTLTVSSIQPSDCHTTVRPAKPPVVDRSLKPGALSNSESIPTIDGLRHVVVPGRLCPQFLQLASANTARGVETCGILCGKLMRNEFTITHVLIPKQSAGSDYCNTENEEELFLIQDQQGLITLGWIHTHPTQTAFLSSVDLHTHCSYQMMLPESVAIVCSPKFQETGFFKLTDHGLEEISSCRQKGFHPHSKDPPLFCSCSHVTVVDRAVTITDLR

SEQ ID NO: 757 - protein, 1935 aa, human; identical to SEQ ID NO: 633

SEQ ID NO: 758 - protein, 1827 aa, human
MADERKDEAKAPHWTSAPLTEASAHSHPPEIKDQGGRGEGLVRSANGFPYREDEEGAFGEHGSQGTYSNTKENGINGELTSADRETAEEVSARIVQVVTAEAVAVLKAEQEKEAQHKDQTAALPLAAEETANLPPSPPPSPASEQTVTVEEDLLTASKMEFHDQQELTPSTAEPSDQKEKESEKQSSPGEDLKHAALVSQPETTKTYPDKKDMQGTEEEKAPLALFGHTLVASLEDMKQKTEPSLVVPGIDLPKEPPTPKEQKDWFIEMPTEAKKDEWGLVAPISPGPLTPMREKDVFDDIPKWEGKQFDSPMPSPFQGGSFTLPLDVMKNEIVTETSPFAPAFLQPDDKKSLQQTSGPATAKDSFKIEEPHEAKPDKMAEAPPSEAMTLPKDAHIPVVEEHVMGKVLEEEKEAINQETVQQRDTFTPSGQEPILTEKETELKLEEKTTISDKEAVPKESKPPKPADEEIGIIQTSTEHTFSEQKDQEPTTDMLKQDSFPVSLEQAVTDSAMTSKTLEKAMTEPSALIEKSSIQELFEMRVDDKDKIEGVGAATSAELDMPFYEDKSGMSKYFETSALKEEATKSIEPGSDYYELSDTRESVHESIDTMSPMHKNGDKEFQTGKESQPSPPAQEAGYSTLAQSYPSDLPEEPSSPQERMFTIDPKVYGEKRDLHSKNKDDLTLSRSLGLGGRSAIEQRSMSINLPMSCLDSIALGFNFGRGHDLSPLASDILTNTSGSMDEGDDYLPATTPALEKAPCFPVESKEEEQIEKVKATGEESTQAEISCESPFLAKDFYKNGTVMAPDLPEMLDLAGTRSRLASVSADAEVARRKSVPSETVVEDSRTGLPPVTDENHVIVKTDSQLEDLGYCVFNKYTVPLPSPVQDSENLSGESGTFYEGTDDKVRRDLATDLSLIEVKLAAAGRVKDEFSVDKEASAHISGDKSGLSKEFDQEKKANDRLDTVLEKSEEHADSKEHAKKTEEAGDEIETFGLGVTYEQALAKDLSIPTDASSEKAEKGLSSVPEIAEVEPSKKVEQGLDFAVQGQLDVKISDFGQMASGLNIDDRRATELKLEATQDMTPSSKAPQEADAFMGVESGHMKEGTKVSETEVKQKVAKPDLVHQEAVDKEESYESSGEHESLTMESLKADEGKKETSPESSLIQDEIAVKLSVEIPCPPAVSEADLATDERADVQMEFIQGPKEESKETPDISITPSDVAEPLHETIVSEPAEIQSEEEEIEAQGEYDKLLFRSDTLQITDLGVSGAREEFVETCPSEHKGVIESVVTIEDDFITVVQTTTDEGESGSHSVRFAALEQPEVERRPSPHDEEEFEVEEAAEAQAEPKDGSPEAPASPEREEVALSEYKTETYDDYKDETTIDDSIMDADSLWVDTQDDDRSIMTEQLETIPKEEKAEKEARRSSLEKHRKEKPFKTGRGRISTPERKVAKKEPSTVSRDEVRRKKAVYKKAELAKKTEVQAHSPSRKFILKPAIKYTRPTHLSCVKRKTTAAGGESALAPSVFKQAKDKVSDGVTKSPEKRSSLPRPSSILPPRRGVSGDRDENSFSLNSSISSSARRTTRSEPIRRAGKSGTSTPTTPGSTAITPGTPPSYSSRTPGTPGTPSYPRTPHTPGTPKSAILVPSEKKVAIIRTPPKSPATPKQLRLINQPLPDLKNVKSKIGSTDNIKYQPKGGQVQIVTKKIDLSHVTSKCGSLKNIRHRPGGGRVKIESVKLDFKEKVQAKVGSLDNAHHVPGGGNVKIDSQKLNFREHAKARVDHGAEIITQSPGRSSVASPRRLSNVSSSGSINLLESPQLATLAEDVTAALAKQGL

SEQ ID NO: 759 - protein, 97 aa, human
MALPLRPLTRGLASAAKGGHGGAGARTWRLLTFVLALPSVALCTFNSYLHSGHRPRPEFRPYQHLRIRTKPYPWGDGNHTLFHNSHVNPLPTGYEHP

SEQ ID NO: 760 - protein, 780 aa, human
MTHEEHHAAKTLGIGKAIAVLTSGGDAQGMNAAVRAVVRVGIFTGARVFFVHEGYQGLVDGGDHIKEATWESVSMMLQLGGTVIGSARCKDFREREGRLRAAYNLVKRGITNLCVIGGDGSLTGADTFRSEWSDLLSDLQKAGKITDEEATKSSYLNIVGLVGSIDNDFCGTDMTIGTDSALHRIMEIVDAITTTAQSHQRTFVLEVMGRHCGYLALVTSLSCGADWVFIPECPPDDDWEEHLCRRLSETRTRGSRLNIIIVAEGAIDKNGKPITSEDIKNLVVKRLGYDTRVTVLGHVQRGGTPSAFDRILGSRMGVEAVMALLEGTPDTPACVVSLSGNQAVRLPLMECVQVTKDVTKAMDEKKFDEALKLRGRSFMNNWEVYKLLAHVRPPVSKSGSHTVAVMNVGAPAAGMNAAVRSTVRIGLIQGNRVLVVHDGFEGLAKGQIEEAGWSYVGGWTGQGGSKLGTKRTLPKKSFEQISANITKFNIQGLVIIGGFEAYTGGLELMEGRKQFDELCIPFVVIPATVSNNVPGSDFSVGADTALNTICTTCDRIKQSAAGTKRRVFIIETMGGYCGYLATMAGLAAGADAAYIFEEPFTIRDLQANVEHLVQKMKTTVKRGLVLRNEKCNENYTTDFIFNLYSEEGKGIFDSRKNVLGHMQQGGSPTPFDRNFATKMGAKAMNWMSGKIKESYRNGRIFANTPDSGCVLGMRKRALVFQPVAELKDQTDFEHRIPKEQWWLKLRPILKILAKYEIDLDTSDHAHLEHITRKRSGEAAV

SEQ ID NO: 761 - protein, 1827 aa, human; identical to SEQ ID NO: 758

SEQ ID NO: 762 - protein, 105 aa, human
ATAKVITDPDILKTCVPDLSDKRLEVVGLEGAIEMGQIYTKLKNAGRRLAKCSEITFHTTKTLPMQIDVEPWMQTPCTIKITHKNQMPMLMGPPPRSTNFFGFLS

SEQ ID NO: 763 - protein, 319 aa, human
MMVLKVEELVTGKKNGNGEAGEFLPEDFRDGEYEAAVTLEKQEDLKTLLAHPVTLGEQQWKSEKQREAELPKKKLEQRSKLENLEDLEIIIQLKKRKKYRKTKVPVVKEPEPEIITEPVDVPTFLKAALENKLPVVEKFLSDKNNPDVCDEYKRTALHRACLEGHLAIVEKLMEAGAQIEFRDMLESTAIHWASRGGNLDVLKLLLNKGAKISARDKLLSTALHVAVRTGHYECAEHLIACEADLNAKDREGDTPLHDAVRLNRYKMIRLLIMYGADLNIKNCAGKTPMDLVLHWQNGTKAIFDSLRENSYKTSRIATF

SEQ ID NO: 764 - protein, 313 aa, human
AATASAGAGGIDGKPRTSPKSVKFLFGGLAGMGATVFVQPLDLVKNRMQLSGEGAKTREYKTSFHALTSILKAEGLRGIYTGLSAGLLRQATYTTTRLGIYTVLFERLTGADGTPPGFLLKAVIGMTAGATGAFVGTPAEVALIRMTADGRLPADQRRGYKNVFNALIRITREEGVLTLWRGCIPTMARAVVVNAAQLASYSQSKQFLLDSGYFSDNILCHFCASMISGLVTTAASMPVDIAKTRIQNMRMIDGKPEYKNGLDVLFKVVRYEGFFSLWKGFTPYYARLGPHTVLTFIFLEQMNKAYKRLFLSG

SEQ ID NO: 765 - protein, 349 aa, human; identical to SEQ ID NO: 680

SEQ ID NO: 766 - protein, 18 aa, human
MIFSMILCCAIRRNREMV

SEQ ID NO: 767 - protein, 901 aa, human
MMMVMQPEGLGAGEGRFAGGGGGGEYMEQEEDWDRDLLLDPAWEKQQRKTFTAWCNSHLRKAGTQIENIEEDFRNGLKLMLLLEVISGERLPRPDKGKMRFHKIANVNKALDFIASKGVKLVSIGAEEIVDGNLKMTLGMIWTIILRFAIQDISVEETSAKEGLLLWCQRKTAPYRNVNVQNFHTSWKDGLALCALIHRHRPDLIDYAKLRKDDPIGNLNTAFEVAEKYLDIPKMLDAEDIVNTPKPDEKAIMTYVSCFYHAFAGAEQAETAANRICKVLAVNQENEKLMEEYEKLASELLEWIRRTVPWLENRVGEPSMSAMQRKLEDFRDYRRLHKPPRIQEKCQLEINFNTLQTKLRLSHRPAFMPSEGKLVSDIANAWRGLEQVEKGYEDWLLSEIRRLQRLQHLAEKFRQKASLHEAWTRGKEEMLSQRDYDSALLQEVRALLRRHEAFESDLAAHQDRVEHIAALAQELNELDYHEAASVNSRCQAICDQWDNLGTLTQKRRDALERMEKLLETIDQLQLEFARRAAPFNNWLDGAVEDLQDVWLVHSVEETQSLLTAHDQFKATLPEADRERGAIMGIQGEIQKICQTYGLRPCSTNPYITLSPQDINTKWDMVRKLVPSRDQTLQEELARQQVNERLRRQFAAQANAIGPWIQAKVEEVGRLAAGLAGSLEEQMAGLRQQEQNIINYKTNIDRLEGDHQLLQESLVFDNKHTVYSMEHIRVGWEQLLTSIARTINEVENQVLTRDAKGLSQEQLNEFRASFNHFDRKRNGMMEPDDFRACLISMGYDLGEVEFARIMTMVDPNAAGVVTFQAFIDFMTRETAETDTTEQVVASFKILAGDKNYITPEELRRELPAKQAEYCIRRMVPYKGSGAPAGALDYVAFSSALYGESDL

SEQ ID NO: 768 - protein, 172 aa, human
PHCPGQCLIWACKTCKRKSAPTDRRKAATLRERRRLKKINEAFEALKRRTVANPNQRLPKVEILRSAISYIERLQDLLHRLDQQEKMQELGVDPFSYRPKQENLEGADFLRTCSSQWPSVSDHSRGLVITAKEGGASIDSSASSSLRCLSSIVDSISSEERKLPCVEEVVEK

SEQ ID NO: 769 - protein, 505 aa, human
MEKQRQEEQRKRTEEERKRRIEQDMLEKRKIQRELAKRAEQIEDINNTGTESASEEGDDSLLITVVPVKSYKTSGKMKKNFEDLEKEREEKERIKYEEDKRIRYEEQRPSLKEAKCLSLVMDDEIESEAKIFKGYRPGKLKLSFEEMERQRREDEKRKAEEEARRRIEEEKKAFAEARRNMVVDDDSPEMYKTISQEFLTPGKLEINFEELLKQKMEEEKRRTEEERKHKLEMEKQEFEQLRQEMGEEEEENETFGLSREYEELIKLKRSGSIQAKNLKSKFEKIGQLSEKEIQKKIEEERARRRTIDLEIKEREAENFHEEDDVDVRPARKSEAPFTHKVNMKARFEQMAKAREEEEQRRIEEQKLLRMQFEQREIDAALQKKREEEEEEEGSIMNGSTAEDEEQTRSGAPWFKKPLKNTSVVDSEPVRFTVKVTGEPKPEITWWFEGEILQDGEDYQYIERGETHCLYLPETFPEDGGEYMCKAVNNKGSAASTCILTIESKN

SEQ ID NO: 770 - protein, 605 aa, human
HALQSARHDCDLLREQYEEETEAKAELQRVLSKANSEVAQWRTKYETDAIQRTEELEEAKKKLAQRLQEAEEAVEAVNAKCSSLEKTKHRLQNEIEDLMVDVERSNAAAAALDKKQRNFDKILAEWKQKYEESQSELESSQKEARSLSTELFKLKNAYEESLEHLETFKRENKNLQEEISDLTEQLGSSGKTIHELEKVRKQLEAEKMELQSALEEAEASLEHEEGKILRAQLEFNQIKAEIERKLAEKDEEMEQAKRNHLRVVDSLQTSLDAETRSRNEALRVKKKMEGDLNEMEIQLSHANRMAAEAQKQVKSLQSLLKDTQIQLDDAVRANDDLKENIAIVERRNNLLQAELEELRAVVEQTERSRKLAEQELIETSERVQLLHSQNTSLINQKKKMDADLSQLQTEVEEAVQECRNAEEKAKKAITDAAMMAEELKKEQDTSAHLERMKKNMEQTIKDLQHRLDEAEQIALKGGKKQLQKLEARVRELENELEAEQKRNAESVKGMRKSERRIKELTYQTEEDRKNLLRLQDLVDKLQLKVKAYKRQAEEAEEQANTNLSKFRKVQHELDEAEERADIAESQVNKLRAKSRDIGTKGLNEE

SEQ ID NO: 771 - protein, 665 aa, human
SLALFQSFETGHCLNETNVTKDVVCLNDVSCYFSLLEGGRPEDKLEFTFKLYDTDRNGILDSSEVDKIILQMMRVAEYLDWDVSELRPILQEMMKEIDYDGSGSVSQAEWVRAGATTVPLLVLLGLEMTLKDDGQHMWRPKRFPRPVYCNLCESSIGLGKQGLSCNLCKYTVHDQCAMKALPCEVSTYAKSRKDIGVQSHVWVRGGCESGRCDRCQKKIRIYHSLTGLHCVWCHLEIHDDCLQAVGHECDCGLLRDHILPPSSIYPSVLASGPDRKNSKTSQKTMDDLNLSTSEALRIDPVPNTHPLLVFVNPKSGGKQGQRVLWKFQYILNPRQVFNLLKDGPEIGLRLFKDVPDSRILVCGGDGTVGWILETIDKANLPVLPPVAVLPLGTGNDLARCLRWGGGYEGQNLAKILKDLEMSKVVHMDRWSVEVIPQQTEEKSDPVPFQIINNYFSIGVDASIAHRFHIMREKYPEKFNSRMKNKLWYFEFATSESIFSTCKKLEESLTVEICGKPLDLSNLSLEGIAVLNIPSMHGGSNLWGDTRRPHGDIYGINQALGATAKVITDPDILKTCVPDLSDKRLEVVGLEGAIEMGQIYTKLKNAGRRLAKCSEITFHTTKTLPMQIDVEPWMQTPCTIKITHKNQMPMLMGPPPRSTNFFGFLS

SEQ ID NO: 772 - protein, 76 aa, human
MMEVESSYSDFISCDRTGRRNAVPDIQGDSEAVSVRKLAGDMGELALEGAEGQVEGSAPDKEAGNQPQSSDGTTSS

SEQ ID NO: 773 - protein, 596 aa, human
MSNYSVSLVGPAPWGFRLQGGKDFNMPLTISSLKDGGKAAQANVRIGDVVLSIDGINAQGMTHLEAQNKIKGCTGSLNMTLQRASAAPKPEPVPVQKGEPKEVVKPVPITSPAVSKVTSTNNMAYNKAPRPFGSVSSPKVTSIPSPSSAFTPAHATTSSHASPSPVAAVTPPLFAASGLHANANLSADQSPSALSAGKTAVNVPRQPTVTSVCSETSQELAEGQRRGSQGDSKQQNGPPRKHIVERYTEFYHVPTHSDASKKRLIEDTEDWRPRTGTTQSRSFRILAQITGTEHLKESEADNTKKANNSQEPSPQLASLVASTRSMPESLDSPTSGRPGVTSLTTAAAFKPVGSTGVIKSPSWQRPNQGVPSTGRISNSATYSGSVAPANSALGQTQPSDQDTLVQRAEHIPAGKRTPMCAHCNQVIRGPFLVALGKSWHPEEFNCAHCKNTMAYIGFVEEKGALYCELCYEKFFAPECGRCQRKILGEVINALKQTWHVSCFVCVACGKPIRNNVFHLEDGEPYCETDYYALFGTICHGCEFPIEAGDMFLEALGYTWHDTCFVCSVCCESLEGQTFFSKKDKPLCKKHAHSVNF

SEQ ID NO: 774 - protein, 595 aa, human
QMMRVAEYLDWDVSELRPILQEMMKEIDYDGSGSVSQAEWVRAGATTVPLLVLLGLEMTLKDDGQHMWRPKRFPRPVYCNLCESSIGLGKQGLSCNLCKYTVHDQCAMKALPCEVSTYAKSRKDIGVQSHVWVRGGCESGRCDRCQKKIRIYHSLTGLHCVWCHLEIHDDCLQAVGHECDCGLLRDHILPPSSIYPSVLASGPDRKNSKTSQKTMDDLNLSTSEALRIDPVPNTHPLLVFVNPKSGGKQGQRVLWKFQYILNPRQVFNLLKDGPEIGLRLFKDVPDSRILVCGGDGTVGWILETIDKANLPVLPPVAVLPLGTGNDLARCLRWGGGYEGQNLAKILKDLEMSKVVHMDRWSVEVIPQQTEEKSDPVPFQIINNYFSIGVDASIAHRFHIMREKYPEKFNSRMKNKLWYFEFATSESIFSTCKKLEESLTVEICGKPLDLSNLSLEGIAVLNIPSMHGGSNLWGDTRRPHGDIYGINQALGATAKVITDPDILKTCVPDLSDKRLEVVGLEGAIEMGQIYTKLKNAGRRLAKCSEITFHTTKTLPMQIDVEPWMQTPCTIKITHKNQMPMLMGPPPRSTNFFGFLS

SEQ ID NO: 775 - protein, 1165 aa, human; identical to SEQ ID NO: 667

SEQ ID NO: 776 - protein, 36 aa, human; identical to SEQ ID NO: 724

SEQ ID NO: 777 - protein, 593 aa, human
MAEMGSKGVTAGKIASNVQKKLTRAQEKVLQKLGKADETKDEQFEQCVQNFNKQLTEGTRLQKDLRTYLASVKAMHEASKKLNECLQEVYEPDWPGRDEANKIAENNDLLWMDYHQKLVDQALLTMDTYLGQFPDIKSRIAKRGRKLVDYDSARHHYESLQTAKKKDEAKIAKPVSLLEKAAPQWCQGKLQAHLVAQTNLLRNQAEEELIKAQKVFEEMNVDLQEELPSLWNSRVGFYVNTFQSIAGLEENFHKEMSKLNQNLNDVLVGLEKQHGSNTFTVKAQPSDNAPAKGNKSPSPPDGSPAATPEIRVNHEPEPAGGATPGATLPKSPSQLRKGPPVPPPPKHTPSKEVKQEQILSLFEDTFVPEISVTTPSQFEAPGPFSEQASLLDLDFDPLPPVTSPVKAPTPSGQSIPWDLWEPTESPAGSLPSGEPSAAEGTFAVSWPSQTAEPGPAQPAEASEVAGGTQPAAGAQEPGETAASEAASSSLPAVVVETFPATVNGTVEGGSGAGRLDLPPGFMFKVQAQHDYTATDTDELQLKAGDVVLVIPFQNPEEQDEGWLMGVKESDWNQHKELEKCRGVFPENFTERVP

SEQ ID NO: 778 - protein, 477 aa, human
MANMQGLVERLERAVSRLESLSAESHRPPGNCGEVNGVIAGVAPSVEAFDKLMDSMVAEFLKNSRILAGDVETHAEMVHSAFQAQRAFLLMASQYQQPHENDVAALLKPISEKIQEIQTFRERNRGSNMFNHLSAVSESIPALGWIAVSPKPGPYVKEMNDAATFYTNRVLKDYKHSDLRHVDWVKSYLNIWSELQAYIKEHHTTGLTWSKTGPVASTVSAFSVLSSGPGLPPPPPPLPPPGPPPLFENEGKKEESSPSRSALFAQLNQGEAITKGLRHVTDDQKTYKNPSLRAQGGQTQSPTKSHTPSPTSPKSYPSQKHAPVLELEGKKWRVEYQEDRNDLVISETELKQVAYIFKCEKSTIQIKGKVNSIIIDNCKKLGLVFDNVVGIVEVINSQDIQIQVMGRVPTISINKTEGCHIYLSEDALDCEIVSAKSSEMNILIPQDGDYREFPIPEQFKTAWDGSKLITEPAEIMA

SEQ ID NO: 779 - protein, 780 aa, human [sequence omitted]

SEQ ID NO: 780 - protein, 780 aa, human [sequence omitted]

SEQ ID NO: 781 - protein, 1935 aa, human; identical to SEQ ID NO: 633

SEQ ID NO: 782 - protein, 150 aa, human; identical to SEQ ID NO: 675

SEQ ID NO: 783 - protein, 1235 aa, human
GIRICRKGFPNRILYGDFRQRYRILNPAAIPEGQFIDSRKGAEKLLSSLDIDHNQYKFGHTKVFFKAGLLGLLEEMRDERLSRIITRIQAQSRGVLARMEYKKLLERRDSLLVIQWNIRAFMGVKNWPWMKLYFKIKPLLKSAEREKEMASMKEEFTRLKEALEKSEARRKELEEKMVSLLQEKNDLQLQVQAEQDNLADAEERCDQLIKNKIQLEAKVKEMNERLEDEEEMNAELTAKKRKLEDECSELKRDIDDLELTLAKVEKEKHATENKVKNLTEEMAGLDEIIAKLTKEKKALQEAHQQALDDLQAEEDKVNTLTKAKVKLEQQVDDLEGSLEQEKKVRMDLERAKRKLEGDLKLTQESIMDLENDKQQLDERLKKKDFELNALNARIEDEQALGSQLQKKLKELQARIEELEEELESERTARAKVEKLRSDLSRELEEISERLEEAGGATSVQIEMNKKREAEFQKMRRDLEEATLQHEATAAALRKKHADSVAELGEQIDNLQRVKQKLEKEKSEFKLELDDVTSNMEQIIKAKANLEKMCRTLEDQMNEHRSKAEETQRSVNDLTSQRAKLQTENGELSRQLDEKEALISQLTRGKLTYTQQLEDLKRQLEEEVKAKNALAHALQSARHDCDLLREQYEEETEAKAELQRVLSKANSEVAQWRTKYETDAIQRTEELEEAKKKLAQRLQEAEEAVEAVNAKCSSLEKTKHRLQNEIEDLMVDVERSNAAAAALDKKQRNFDKILAEWKQKYEESQSELESSQKEARSLSTELFKLKNAYEESLEHLETFKRENKNLQEEISDLTEQLGSSGKTIHELEKVRKQLEAEKMELQSALEEAEASLEHEEGKILRAQLEFNQIKAEIERKLAEKDEEMEQAKRNHLRVVDSLQTSLDAETRSRNEALRVKKKMEGDLNEMEIQLSHANRMAAEAQKQVKSLQSLLKDTQIQLDDAVRANDDLKENIAIVERRNNLLQAELEELRAVVEQTERSRKLAEQELIETSERVQLLHSQNTSLINQKKKMDADLSQLQTEVEEAVQECRNAEEKAKKAITDAAMMAEELKKEQDTSAHLERMKKNMEQTIKDLQHRLDEAEQIALKGGKKQLQKLEARVRELENELEAEQKRNAESVKGMRKSERRIKELTYQTEEDRKNLLRLQDLVDKLQLKVKAYKRQAEEAEEQANTNLSKFRKVQHELDEAEERADIAESQVNKLRAKSRDIGTKGLNEE

SEQ ID NO: 784 - protein, 469 aa, human
MEERMEMISERPKESMYSWNKTAEKSDFEAVEALMSMSCSWKSDFKKYVENRPVTPVSDLSEEENLLPGTPDFHTIPAFCLTPPYSPSDFEPSQVSNLMAPAPSTVHFKSLSDTAKPHIAAPFKEEEKSPVSAPKLPKAQATSVIRHTADAQLCNHQTCPMKAASILNYQNNSFRRRTHLNVEAARKNIPCAAVSPNRSKCERNTVADVDEKASAALYDFSVPSSETVICRSQPAPVSPQQKSVLVSPPAVSAGGVPPMPVICQMVPLPANNPVVTTVVPSTPPSQPPAVCPPVVFMGTQVPKGAVMFVVPQPVVQSSKPPVVSPNGTRLSPIAPAPGFSPSAAKVTPQIDSSRIRSHICSHPGCGKTYFKSSHLKAHTRTHTGEKPFSCSWKGCERRFARSDELSRHRRTHTGEKKFACPMCDRRFMRSDHLTKHARRHLSAKKLPNWQMEVSKLNDIALPPTPAPTQ

SEQ ID NO: 785 - protein, 487 aa, human
MLRAPGCLLRTSVAPAAALAAALLSSLARCSLLEPRDPVASSLSPYFGTKTRYEDVNPVLLSGPEAPWRDPELLEGTCTPVQLVALIRHGTRYPTVKQIRKLRQLHGLLQPRGSRDGGASSTGSRDLGAALRDWPLWYADWMDGQLVEKGRQDMRHVALRLASLFPALFSRENYGRLRLITSSKHRCMDSSAAFLQGLWQHYHPGLPPPDVADMEFGPPTVNDKLMRFFDHCEKFLTEVEKNATALYHVEAFKTGPEMQNILKKVAATLQVPVNDLNADLIQVAFFTCSFDLAIKGVKSPWCDVFDIDDAKVLEYLNDLKQYWKRGYGYTINSRSSCTLFQDIFQHLDKAVEQKQRSQPISSPVILQFGHAETLLPLLSLMGYFKDKEPLTAYNYKKQMHRKFRSGLIVPYASNLIFVLYHCENAKTPKEQFRVQMLLNEKVLPLAYSQETVSFYEDLKNHYKDILQSCQTSEECELARANSTSDEL

SEQ ID NO: 786 - protein, 828 aa, human
MRFLEARSLAVAMGDTVVEPAPLKPTSEPTSGPPGNNGGSLLSVITEGVGELSVIDPEVAQKACQEVLEKVKLLHGGVAVSSRGTPLELVNGDGVDSEIRCLDDPPAQIREEEDEMGAAVASGTAKGARRRRQNNSAKQSWLLRLFESKLFDISMAISYLYNSKEPGVQAYIGNRLFCFRNEDVDFYLPQLLNMYIHMDEDVGDAIKPYIVHRCRQSINFSLQCALLLGAYSSDMHISTQRHSRGTKLRKLILSDELKPAHRKRELPSLSPAPDTGLSPSKRTHQRSKSDATASISLSSNLKRTASNPKVENEDEELSSSTESIDNSFSSPVRLAPEREFIKSLMAIGKRLATLPTKEQKTQRLISELSLLNHKLPARVWLPTAGFDHHVVRVPHTQAVVLNSKDKAPYLIYVEVLECENFDTTSVPARIPENRIRSTRSVENLPECGITHEQRAGSFSTVPNYDNDDEAWSVDDIGELQVELPEVHTNSCDNISQFSVDSITSQESKEPVFIAAGDIRRRLSEQLAHTPTAFKRDPEDPSAVALKEPWQEKVRRIREGSPYGHLPNWRLLSVIVKCGDDLRQELLAFQVLKQLQSIWEQERVPLWIKPYKILVISADSGMIEPVVNAVSIHQVKKQSQLSLLDYFLQEHGSYTTEAFLSAQRNFVQSCAGYCLVCYLLQVKDRHNGNILLDAEGHIIHIDFGFILSSSPRNLGFETSAFKLTTEFVDVMGGLDGDMFNYYKMLMLQGLIAARKHMDKVVQIVEIMQQGSQLPCFHGSSTIRNLKERFHMSMTEEQLQLLVEQMVDGSMRSITTKLYDGFQYLTNGIM

SEQ ID NO: 787 - protein, 127 aa, human
MSQGLPAAGSVLQRSVAAPGNQPQPQPQQQSPEDDDRKVRRREKNRVAAQRSRKKQTQKADKLHEEYESLEQENTMLRREIGKLTEELKHLTEALKEHEKMCPLLLCPMNFVPVPPRPDPVAGCLPR

SEQ ID NO: 788 - protein, 36 aa, human; identical to SEQ ID NO: 724

SEQ ID NO: 789 - protein, 1305 aa, human; identical to SEQ ID NO: 671

SEQ ID NO: 790 - protein, 377 aa, human; identical to SEQ ID NO: 335

SEQ ID NO: 791 - DNA, 465 bp, rat; identical to SEQ ID NO: 2

SEQ ID NO: 792 - DNA, 5925 bp, rat; identical to SEQ ID NO: 3

SEQ ID NO: 793 - DNA, 656 bp, rat; identical to SEQ ID NO: 4
  misc_feature (494)..(494): n is a, c, g, or t
  misc_feature (524)..(524): n is a, c, g, or t
  misc_feature (580)..(580): n is a, c, g, or t
  misc_feature (636)..(636): n is a, c, g, or t
  misc_feature (640)..(641): n is a, c, g, or t

SEQ ID NO: 794 - DNA, 1285 bp, rat; identical to SEQ ID NO: 5

SEQ ID NO: 795 - DNA, 1448 bp, rat; identical to SEQ ID NO: 7
  misc_feature (1345)..(1345): n is a, c, g, or t
  misc_feature (1376)..(1376): n is a, c, g, or t
  misc_feature (1413)..(1414): n is a, c, g, or t

SEQ ID NO: 796 - DNA, 640 bp, rat; identical to SEQ ID NO: 11

SEQ ID NO: 797 - DNA, 637 bp, rat; identical to SEQ ID NO: 13

SEQ ID NO: 798 - DNA, 620 bp, rat; identical to SEQ ID NO: 15

SEQ ID NO: 799 - DNA, 538 bp, rat; identical to SEQ ID NO: 18

SEQ ID NO: 800 - DNA, 6035 bp, rat; identical to SEQ ID NO: 20

SEQ ID NO: 801 - DNA, 1318 bp, rat; identical to SEQ ID NO: 22

SEQ ID NO: 802 - DNA, 541 bp, rat; identical to SEQ ID NO: 23

SEQ ID NO: 803 - DNA, 490 bp, rat; identical to SEQ ID NO: 24

SEQ ID NO: 804 - DNA, 1782 bp, rat; identical to SEQ ID NO: 25

SEQ ID NO: 805 - DNA, 1849 bp, rat; identical to SEQ ID NO: 26

SEQ ID NO: 806 - DNA, 1502 bp, rat; identical to SEQ ID NO: 29

SEQ ID NO: 807 - DNA, 1353 bp, rat; identical to SEQ ID NO: 30

SEQ ID NO: 808 - DNA, 579 bp, rat; identical to SEQ ID NO: 31

SEQ ID NO: 809 - DNA, 3996 bp, rat; identical to SEQ ID NO: 32
  misc_feature (652)..(652): n is a, c, g, or t

SEQ ID NO: 810 - DNA, 1789 bp, rat; identical to SEQ ID NO: 33

SEQ ID NO: 811 - DNA, 5925 bp, rat; identical to SEQ ID NO: 3

SEQ ID NO: 812 - DNA, 440 bp, rat; identical to SEQ ID NO: 35
  misc_feature (300)..(300): n is a, c, g, or t
  misc_feature (369)..(369): n is a, c, g, or t
  misc_feature (374)..(374): n is a, c, g, or t

SEQ ID NO: 813 - DNA, 885 bp, rat; identical to SEQ ID NO: 37

SEQ ID NO: 814 - DNA, 5925 bp, rat; identical to SEQ ID NO: 3

SEQ ID NO: 815 - DNA, 1998 bp, rat; identical to SEQ ID NO: 51

SEQ ID NO: 816 - DNA, 2626 bp, rat; identical to SEQ ID NO: 61

SEQ ID NO: 817 - DNA, 497 bp, rat; identical to SEQ ID NO: 62

SEQ ID NO: 818 - DNA, 588 bp, rat; identical to SEQ ID NO: 65

SEQ ID NO: 819 - DNA, 593 bp, rat; identical to SEQ ID NO: 66

SEQ ID NO: 820 - DNA, 591 bp, rat; identical to SEQ ID NO: 67

SEQ ID NO: 821 - DNA, 2208 bp, rat; identical to SEQ ID NO: 69

SEQ ID NO: 822 - DNA, 504 bp, rat; identical to SEQ ID NO: 70

SEQ ID NO: 823 - DNA, 436 bp, rat; identical to SEQ ID NO: 71

SEQ ID NO: 824 - DNA, 282 bp, rat; identical to SEQ ID NO: 75

SEQ ID NO: 825 - DNA, 622 bp, rat; identical to SEQ ID NO: 76

SEQ ID NO: 826 - DNA, 5721 bp, rat; identical to SEQ ID NO: 81

SEQ ID NO: 827 - DNA, 426 bp, rat; identical to SEQ ID NO: 82

SEQ ID NO: 828 - DNA, 2131 bp, rat; identical to SEQ ID NO: 85

SEQ ID NO: 829 - DNA, 696 bp, rat; identical to SEQ ID NO: 86

SEQ ID NO: 830 - DNA, 523 bp, rat; identical to SEQ ID NO: 87
  misc_feature (457)..(457): n is a, c, g, or t

SEQ ID NO: 831 - DNA, 552 bp, rat; identical to SEQ ID NO: 92

SEQ ID NO: 832 - DNA, 1039 bp, rat; identical to SEQ ID NO: 93

SEQ ID NO: 833 - DNA, 325 bp, rat; identical to SEQ ID NO: 97
  misc_feature (194)..(194): n is a, c, g, or t
  misc_feature (289)..(289): n is a, c, g, or t
  misc_feature (298)..(298): n is a, c, g, or t
  misc_feature (302)..(302): n is a, c, g, or t

SEQ ID NO: 834 - DNA, 6849 bp, rat; identical to SEQ ID NO: 100
  misc_feature (2293)..(2293): n is a, c, g, or t

SEQ ID NO: 835 - DNA, 1912 bp, rat; identical to SEQ ID NO: 101

SEQ ID NO: 836 - DNA, 821 bp, rat; identical to SEQ ID NO: 102

SEQ ID NO: 837 - DNA, 1842 bp, rat; identical to SEQ ID NO: 103

SEQ ID NO: 838 - DNA, 717 bp, rat; identical to SEQ ID NO: 105

SEQ ID NO: 839 - DNA, 2935 bp, rat; identical to SEQ ID NO: 108

SEQ ID NO: 840 - DNA, 3732 bp, rat; identical to SEQ ID NO: 116

SEQ ID NO: 841 - DNA, 4409 bp, rat; identical to SEQ ID NO: 118

SEQ ID NO: 842 - DNA, 1502 bp, rat; identical to SEQ ID NO: 29

SEQ ID NO: 843 - DNA, 2169 bp, rat; identical to SEQ ID NO: 122

SEQ ID NO: 844 - DNA, 1782 bp, rat; identical to SEQ ID NO: 25

SEQ ID NO: 845 - DNA, 1068 bp, rat; identical to SEQ ID NO: 125

SEQ ID NO: 846 - DNA, 2199 bp, rat; identical to SEQ ID NO: 128

SEQ ID NO: 847 - DNA, 2142 bp, rat; identical to SEQ ID NO: 132

SEQ ID NO: 848 - DNA, 678 bp, rat; identical to SEQ ID NO: 133

SEQ ID NO: 849 - DNA, 541 bp, rat; identical to SEQ ID NO: 137
  misc_feature (388)..(388): n is a, c, g, or t
  misc_feature (491)..(491): n is a, c, g, or t

SEQ ID NO: 850 - DNA, 2707 bp, rat; identical to SEQ ID NO: 140

SEQ ID NO: 851 - DNA, 1380 bp, rat; identical to SEQ ID NO: 145

SEQ ID NO: 852 - DNA, 600 bp, rat; identical to SEQ ID NO: 146

SEQ ID NO: 853 - DNA, 3581 bp, rat; identical to SEQ ID NO: 150

SEQ ID NO: 854 - DNA, 2909 bp, rat; identical to SEQ ID NO: 156

SEQ ID NO: 855 - DNA, 1603 bp, rat; identical to SEQ ID NO: 160

SEQ ID NO: 856 - DNA, 539 bp, rat; identical to SEQ ID NO: 169

SEQ ID NO: 857 - DNA, 2794 bp, rat; identical to SEQ ID NO: 170

SEQ ID NO: 858 - DNA, 655 bp, rat; identical to SEQ ID NO: 172

SEQ ID NO: 859 - DNA, 584 bp, rat; identical to SEQ ID NO: 179

SEQ ID NO: 860 - DNA, 892 bp, rat; identical to SEQ ID NO: 42

SEQ ID NO: 861 - DNA, 1025 bp, rat; identical to SEQ ID NO: 187

SEQ ID NO: 862 - DNA, 4276 bp, rat; identical to SEQ ID NO: 192

SEQ ID NO: 863 - DNA, 4257 bp, rat; identical to SEQ ID NO: 196

SEQ ID NO: 864 - DNA, 1630 bp, rat; identical to SEQ ID NO: 197

SEQ ID NO: 865 - DNA, 3755 bp, rat; identical to SEQ ID NO: 202

SEQ ID NO: 866 - DNA, 664 bp, rat; identical to SEQ ID NO: 203

SEQ ID NO: 867 - DNA, 2040 bp, rat; identical to SEQ ID NO: 207

SEQ ID NO: 868 - DNA, 678 bp, rat; identical to SEQ ID NO: 212

SEQ ID NO: 869 - DNA, 5721 bp, rat; identical to SEQ ID NO: 81

SEQ ID NO: 870 - DNA, 2572 bp, rat; identical to SEQ ID NO: 216

SEQ ID NO: 871 - DNA, 330 bp, rat; identical to SEQ ID NO: 217

SEQ ID NO: 872 - DNA, 513 bp, rat; identical to SEQ ID NO: 219

SEQ ID NO: 873 - DNA, 522 bp, rat; identical to SEQ ID NO: 220

SEQ ID NO: 874 - DNA, 1861 bp, rat; identical to SEQ ID NO: 222

SEQ ID NO: 875 - DNA, 1544 bp, rat; identical to SEQ ID NO: 224

SEQ ID NO: 876 - DNA, 395 bp, rat; identical to SEQ ID NO: 227

SEQ ID NO: 877 - DNA, 5736 bp, rat; identical to SEQ ID NO: 226

SEQ ID NO: 878 - DNA, 330 bp, rat; identical to SEQ ID NO: 217

SEQ ID NO: 879 - DNA, 3043 bp, rat; identical to SEQ ID NO: 235

SEQ ID NO: 880 - DNA, 616 bp, rat; identical to SEQ ID NO: 241

SEQ ID NO: 881 - DNA, 439 bp, rat; identical to SEQ ID NO: 248

SEQ ID NO: 882 - DNA, 356 bp, rat; identical to SEQ ID NO: 249

SEQ ID NO: 883 - DNA, 441 bp, rat; identical to SEQ ID NO: 255

SEQ ID NO: 884 - DNA, 452 bp, rat; identical to SEQ ID NO: 257

SEQ ID NO: 885 - DNA, 5264 bp, rat; identical to SEQ ID NO: 270

SEQ ID NO: 886 - DNA, 592 bp, rat; identical to SEQ ID NO: 271

SEQ ID NO: 887 - DNA, 365 bp, rat; identical to SEQ ID NO: 278

SEQ ID NO: 888 - DNA, 498 bp, rat; identical to SEQ ID NO: 285

SEQ ID NO: 889 - DNA, 686 bp, rat; identical to SEQ ID NO: 289

SEQ ID NO: 890 - DNA, 3115 bp, rat; identical to SEQ ID NO: 290

SEQ ID NO: 891 - DNA, 300 bp, rat; identical to SEQ ID NO: 293

SEQ ID NO: 892 - DNA, 448 bp, rat; identical to SEQ ID NO: 295
  misc_feature (401)..(401): n is a, c, g, or t

SEQ ID NO: 893 - DNA, 452 bp, rat; identical to SEQ ID NO: 298

SEQ ID NO: 894 - DNA, 476 bp, rat; identical to SEQ ID NO: 302

SEQ ID NO: 895 - DNA, 572 bp, rat; identical to SEQ ID NO: 303

SEQ ID NO: 896 - DNA, 515 bp, rat; identical to SEQ ID NO: 306

SEQ ID NO: 897 - DNA, 589 bp, rat; identical to SEQ ID NO: 307

SEQ ID NO: 898 - protein, 154 aa, rat; identical to SEQ ID NO: 310

SEQ ID NO: 899 - protein, 1935 aa, rat; identical to SEQ ID NO: 311

SEQ ID NO: 900 - protein, 375 aa, rat; identical to SEQ ID NO: 312

SEQ ID NO: 901 - protein, 287 aa, rat; identical to SEQ ID NO: 314

SEQ ID NO: 902 - protein, 166 aa, rat; identical to SEQ ID NO: 316

SEQ ID NO: 903 - protein, 146 aa, rat; identical to SEQ ID NO: 318

SEQ ID NO: 904 - protein, 182 aa, rat; identical to SEQ ID NO: 320

SEQ ID NO: 905 - protein, 242 aa, rat; identical to SEQ ID NO: 321

SEQ ID NO: 906 - protein, 484 aa, rat; identical to SEQ ID NO: 322

SEQ ID NO: 907 - protein, 457 aa, rat; identical to SEQ ID NO: 323

SEQ ID NO: 908 - protein, 259 aa, rat; identical to SEQ ID NO: 325

SEQ ID NO: 909 - protein, 359 aa, rat; identical to SEQ ID NO: 326

SEQ ID NO: 910 - protein, 158 aa, rat; identical to SEQ ID NO: 327

SEQ ID NO: 911 - protein, 324 aa, rat; identical to SEQ ID NO: 328

SEQ ID NO: 912 - protein, 1935 aa, rat; identical to SEQ ID NO: 311

SEQ ID NO: 913 - protein, 199 aa, rat; identical to SEQ ID NO: 330

SEQ ID NO: 914 - protein, 1935 aa, rat; identical to SEQ ID NO: 311

SEQ ID NO: 915 - protein, 371 aa, rat; identical to SEQ ID NO: 337

SEQ ID NO: 916 - protein, 857 aa, rat; identical to SEQ ID NO: 340

SEQ ID NO: 917 - protein, 342 aa, rat; identical to SEQ ID NO: 341

SEQ ID NO: 918 - protein, 1453 aa, rat; identical to SEQ ID NO: 344

SEQ ID NO: 919 - protein, 582 aa, rat; identical to SEQ ID NO: 345

SEQ ID NO: 920 - protein, 166 aa, rat; identical to SEQ ID NO: 347

SEQ ID NO: 921 - protein, 380 aa, rat; identical to SEQ ID NO: 351

SEQ ID NO: 922 - protein, 186 aa, rat; identical to SEQ ID NO: 352

SEQ ID NO: 923 - protein, 561 aa, rat; identical to SEQ ID NO: 353

SEQ ID NO: 924 - protein, 205 aa, rat; identical to SEQ ID NO: 355

SEQ ID NO: 925 - protein, 796 aa, rat; identical to SEQ ID NO: 358

SEQ ID NO: 926 - protein, 461 aa, rat; identical to SEQ ID NO: 364

SEQ ID NO: 927 - protein, 568 aa, rat; identical to SEQ ID NO: 366

SEQ ID NO: 928 - protein, 259 aa, rat; identical to SEQ ID NO: 325

SEQ ID NO: 929 - protein, 722 aa, rat; identical to SEQ ID NO: 370

SEQ ID NO: 930 - protein, 484 aa, rat; identical to SEQ ID NO: 322

SEQ ID NO: 931 - protein, 573 aa, rat; identical to SEQ ID NO: 375

SEQ ID NO: 932 - protein, 447 aa, rat; identical to SEQ ID NO: 378

SEQ ID NO: 933 - protein, 197 aa, rat; identical to SEQ ID NO: 379

SEQ ID NO: 934 - protein, 824 aa, rat; identical to SEQ ID NO: 385

SEQ ID NO: 935 - protein, 283 aa, rat; identical to SEQ ID NO: 386

SEQ ID NO: 936 - protein, 1161 aa, rat; identical to SEQ ID NO: 389

SEQ ID NO: 937 - protein, 673 aa, rat; identical to SEQ ID NO: 394

SEQ ID NO: 938 - protein, 381 aa, rat; identical to SEQ ID NO: 398

SEQ ID NO: 939 - protein, 887 aa, rat; identical to SEQ ID NO: 406

SEQ ID NO: 940 - protein, 385 aa, rat; identical to SEQ ID NO: 407

SEQ ID NO: 941 - protein, 85 aa, rat; identical to SEQ ID NO: 333

SEQ ID NO: 942 - protein, 82 aa, rat; identical to SEQ ID NO: 413

SEQ ID NO: 943 - protein, 1019 aa, rat; identical to SEQ ID NO: 415

SEQ ID NO: 944 - protein, 1107 aa, rat; identical to SEQ ID NO: 417

SEQ ID NO: 945 - protein, 271 aa, rat; identical to SEQ ID NO: 418

SEQ ID NO: 946 - protein, 798 aa, rat; identical to SEQ ID NO: 422

SEQ ID NO: 947 - protein, 165 aa, rat; identical to SEQ ID NO: 423

SEQ ID NO: 948 - protein, 504 aa, rat; identical to SEQ ID NO: 427

SEQ ID NO: 949 - protein, 225 aa, rat; identical to SEQ ID NO: 431

SEQ ID NO: 950 - protein, 1453 aa, rat; identical to SEQ ID NO: 344

SEQ ID NO: 951 - protein, 722 aa, rat; identical to SEQ ID NO: 435

SEQ ID NO: 952 - protein, 70 aa, rat; identical to SEQ ID NO: 436

SEQ ID NO: 953 - protein, 351 aa, rat; identical to SEQ ID NO: 438

SEQ ID NO: 954 - protein, 424 aa, rat; identical to SEQ ID NO: 439

SEQ ID NO: 955 - protein, 94 aa, rat; identical to SEQ ID NO: 442

SEQ ID NO: 956 - protein, 1861 aa, rat; identical to SEQ ID NO: 441

SEQ ID NO: 957 - protein, 70 aa, rat; identical to SEQ ID NO: 436

SEQ ID NO: 958 - protein, 727 aa, rat; identical to SEQ ID NO: 449

SEQ ID NO: 959 - protein, 94 aa, rat; identical to SEQ ID NO: 453

SEQ ID NO: 960 - protein, 1725 aa, rat; identical to SEQ ID NO: 457

SEQ ID NO: 961 - protein, 480 aa, rat; identical to SEQ ID NO: 465

SEQ ID NO: 962 - protein, 451 aa, rat; identical to SEQ ID NO: 466

SEQ ID NO: 963 - DNA, 1066 bp, human; identical to SEQ ID NO: 472

SEQ ID NO: 964 - DNA, 6008 bp, human; identical to SEQ ID NO: 473

SEQ ID NO: 965 - DNA, 3287 bp, human; identical to SEQ ID NO: 474

SEQ ID NO: 966 - DNA, 1420 bp, human; identical to SEQ ID NO: 475

SEQ ID NO: 967 - DNA, 626 bp, human; identical to SEQ ID NO: 478

SEQ ID NO: 968 - DNA, 2532 bp, human; identical to SEQ ID NO: 480

SEQ ID NO: 969 - DNA, 6032 bp, human; identical to SEQ ID NO: 481

SEQ ID NO: 970 - DNA, 1294 bp, human; identical to SEQ ID NO: 482

SEQ ID NO: 971 - DNA, 1772 bp, human; identical to SEQ ID NO: 483

SEQ ID NO: 972 - DNA, 1667 bp, human; identical to SEQ ID NO: 484

SEQ ID NO: 973 - DNA, 2357 bp, human; identical to SEQ ID NO: 486

SEQ ID NO: 974 - DNA, 2665 bp, human; identical to SEQ ID NO: 487

SEQ ID NO: 975 - DNA, 1973 bp, human; identical to SEQ ID NO: 488

SEQ ID NO: 976 - DNA, 2346 bp, human; identical to SEQ ID NO: 489

SEQ ID NO: 977 - DNA, 6008 bp, human; identical to SEQ ID NO: 473

SEQ ID NO: 978 - DNA, 872 bp, human; identical to SEQ ID NO: 491

SEQ ID NO: 979 - DNA, 6008 bp, human; identical to SEQ ID NO: 473

SEQ ID NO: 980 - DNA, 2024 bp, human; identical to SEQ ID NO: 497

SEQ ID NO: 981 - DNA, 3148 bp, human; identical to SEQ ID NO: 498

SEQ ID NO: 982 - DNA, 959 bp, human; identical to SEQ ID NO: 499

SEQ ID NO: 983 - DNA, 2772 bp, human; identical to SEQ ID NO: 500

SEQ ID NO: 984 - DNA, 1938 bp, human; identical to SEQ ID NO: 501

SEQ ID NO: 985 - DNA, 1983 bp, human; identical to SEQ ID NO: 502

SEQ ID NO: 986 - DNA, 1200 bp, human; identical to SEQ ID NO: 506

SEQ ID NO: 987 - DNA, 424 bp, human; identical to SEQ ID NO: 507

SEQ ID NO: 988 - DNA, 2010 bp, human; identical to SEQ ID NO: 508

SEQ ID NO: 989 - DNA, 1059 bp, human; identical to SEQ ID NO: 509

SEQ ID NO: 990 - DNA, 2138 bp, human; identical to SEQ ID NO: 511

SEQ ID NO: 991 - DNA, 1108 bp, human; identical to SEQ ID NO: 513
  misc_feature (1084)..(1084): n is a, c, g, or t
  misc_feature (1092)..(1092): n is a, c, g, or t

SEQ ID NO: 992 - DNA, 2487 bp, human; identical to SEQ ID NO: 514

SEQ ID NO: 993 - DNA, 1590 bp, human; identical to SEQ ID NO: 516

SEQ ID NO: 994 - DNA, 3643 bp, human; identical to SEQ ID NO: 519

SEQ ID NO: 995 - DNA, 2374 bp, human; identical to SEQ ID NO: 525

SEQ ID NO: 996 - DNA, 4103 bp, human; identical to SEQ ID NO: 527

SEQ ID NO: 997 - DNA, 2357 bp, human; identical to SEQ ID NO: 486

SEQ ID NO: 998 - DNA, 3201 bp, human; identical to SEQ ID NO: 531

SEQ ID NO: 999 - DNA, 1772 bp, human; identical to SEQ ID NO: 483

SEQ ID NO: 1000 - DNA, 2277 bp, human; identical to SEQ ID NO: 535

SEQ ID NO: 1001 - DNA, 2385 bp, human; identical to SEQ ID NO: 538

SEQ ID NO: 1002 - DNA, 716 bp, human; identical to SEQ ID NO: 539

SEQ ID NO: 1003 - DNA, 632 bp, human; identical to SEQ ID NO: 543

SEQ ID NO: 1004 - DNA, 2709 bp, human; identical to SEQ ID NO: 546

SEQ ID NO: 1005 - DNA, 1414 bp, human; identical to SEQ ID NO: 547

SEQ ID NO: 1006 - DNA, 1672 bp, human; identical to SEQ ID NO: 548

SEQ ID NO: 1007 - DNA, 3851 bp, human; identical to SEQ ID NO: 551

SEQ ID NO: 1008 - DNA, 2693 bp, human; identical to SEQ ID NO: 556

SEQ ID NO: 1009 - DNA, 3089 bp, human; identical to SEQ ID NO: 559

SEQ ID NO: 1010 - DNA, 5749 bp, human; identical to SEQ ID NO: 566

SEQ ID NO: 1011 - DNA, 2038 bp, human; identical to SEQ ID NO: 567

SEQ ID NO: 1012 - DNA, 886 bp, human; identical to SEQ ID NO: 493

SEQ ID NO: 1013 - DNA, 3279 bp, human; identical to SEQ ID NO: 573

SEQ ID NO: 1014 - DNA, 4666 bp, human; identical to SEQ ID NO: 575

SEQ ID NO: 1015 - DNA, 1722 bp, human; identical to SEQ ID NO: 576

SEQ ID NO: 1016 - DNA, 1963 bp, human; identical to SEQ ID NO: 580

SEQ ID NO: 1017 - DNA, 4752 bp, human; identical to SEQ ID NO: 583

SEQ ID NO: 1018 - DNA, 1246 bp, human; identical to SEQ ID NO: 587

SEQ ID NO: 1019 - DNA, 1271 bp, human; identical to SEQ ID NO: 590

SEQ ID NO: 1020 - DNA, 2784 bp, human; identical to SEQ ID NO: 591

SEQ ID NO: 1021 - DNA, 8374 bp, human; identical to SEQ ID NO: 592

SEQ ID NO: 1022 - DNA, 1109 bp, human; identical to SEQ ID NO: 594

SEQ ID NO: 1023 - DNA, 1764 bp, human; identical to SEQ ID NO: 595

SEQ ID NO: 1024 - DNA, 2107 bp, human; identical to SEQ ID NO: 596

SEQ ID NO: 1025 - DNA, 425 bp, human; identical to SEQ ID NO: 599

SEQ ID NO: 1026 - DNA, 6534 bp, human; identical to SEQ ID NO: 598

SEQ ID NO: 1027 - DNA, 1709 bp, human; identical to SEQ ID NO: 602

SEQ ID NO: 1028 - DNA, 4086 bp, human; identical to SEQ ID NO: 606

SEQ ID NO: 1029 - DNA, 6032 bp, human; identical to SEQ ID NO: 481

SEQ ID NO: 1030 - DNA, 787 bp, human; identical to SEQ ID NO: 610

SEQ ID NO: 1031 - DNA, 1777 bp, human; identical to SEQ ID NO: 611

SEQ ID NO: 1032 - DNA, 1831 bp, human; identical to SEQ ID NO: 614

SEQ ID NO: 1033 - DNA, 1670 bp, human; identical to SEQ ID NO: 615

SEQ ID NO: 1034 - DNA, 6783 bp, human; identical to SEQ ID NO: 552

SEQ ID NO: 1035 - DNA, 2076 bp, human; identical to SEQ ID NO: 623

SEQ ID NO: 1036 - DNA, 2899 bp, human; identical to SEQ ID NO: 624

SEQ ID NO: 1037 - DNA, 2412 bp, human; identical to SEQ ID NO: 625

SEQ ID NO: 1038 - DNA, 3618 bp, human; identical to SEQ ID NO: 629

SEQ ID NO: 1039 - protein, 153 aa, human; identical to SEQ ID NO: 632

SEQ ID NO: 1040 - protein, 1935 aa, human; identical to SEQ ID NO: 633

SEQ ID NO: 1041 - protein, 395 aa, human; identical to SEQ ID NO: 634

SEQ ID NO: 1042 - protein, 224 aa, human; identical to SEQ ID NO: 635

SEQ ID NO: 1043 - protein, 146 aa, human; identical to SEQ ID NO: 638

SEQ ID NO: 1044 - protein, 102 aa, human; identical to SEQ ID NO: 640

SEQ ID NO: 1045 - protein, 1940 aa, human; identical to SEQ ID NO: 641

SEQ ID NO: 1046 - protein, 242 aa, human; identical to SEQ ID NO: 642

SEQ ID NO: 1047 - protein, 477 aa, human; identical to SEQ ID NO: 643

SEQ ID NO: 1048 - protein, 482 aa, human; identical to SEQ ID NO: 644

SEQ ID NO: 1049 - protein, 259 aa, human [sequence omitted]

SEQ ID NO: 1050 - protein, 359 aa, human; identical to SEQ ID NO: 647

SEQ ID NO: 1051 - protein, 465 aa, human; identical to SEQ ID NO: 648

SEQ ID NO: 1052 - protein, 317 aa, human; identical to SEQ ID NO: 649

SEQ ID NO: 1053 - protein, 1935 aa, human; identical to SEQ ID NO: 633

SEQ ID NO: 1054 - protein, 195 aa, human; identical to SEQ ID NO: 651

SEQ ID NO: 1055 - protein, 1935 aa, human; identical to SEQ ID NO: 633

SEQ ID NO: 1056 - protein, 341 aa, human; identical to SEQ ID NO: 657

SEQ ID NO: 1057 - protein, 857 aa, human; identical to SEQ ID NO: 658

SEQ ID NO: 1058 - protein, 1725 aa, human; identical to SEQ ID NO: 659

SEQ ID NO: 1059 - protein, 2005 aa, human; identical to SEQ ID NO: 660

SEQ ID NO: 1060 - protein, 343 aa, human; identical to SEQ ID NO: 661

SEQ ID NO: 1061 - protein, 1795 aa, human; identical to SEQ ID NO: 662

SEQ ID NO: 1062 - protein, 245 aa, human; identical to SEQ ID NO: 666

SEQ ID NO: 1063 - protein, 1165 aa, human; identical to SEQ ID NO: 667

SEQ ID NO: 1064 - protein, 1655 aa, human; identical to SEQ ID NO: 668

SEQ ID NO: 1065 - protein, 166 aa, human; identical to SEQ ID NO: 669

SEQ ID NO: 1066 - protein, 1305 aa, human; identical to SEQ ID NO: 671

SEQ ID NO: 1067 - protein, 187 aa, human; identical to SEQ ID NO: 673

SEQ ID NO: 1068 - protein, 562 aa, human; identical to SEQ ID NO: 674

SEQ ID NO: 1069 - protein, 205 aa, human; identical to SEQ ID NO: 676

SEQ ID NO: 1070 - protein, 793 aa, human; identical to SEQ ID NO: 679

SEQ ID NO: 1071 - protein, 461 aa, human; identical to SEQ ID NO: 685

SEQ ID NO: 1072 - protein, 568 aa, human; identical to SEQ ID NO: 687

SEQ ID NO: 1073 - protein, 259 aa, human [sequence omitted]

SEQ ID NO: 1074 - protein, 728 aa, human; identical to SEQ ID NO: 691

SEQ ID NO: 1075 - protein, 477 aa, human; identical to SEQ ID NO: 643

SEQ ID NO: 1076 - protein, 574 aa, human; identical to SEQ ID NO: 695

SEQ ID NO: 1077 - protein, 447 aa, human; identical to SEQ ID NO: 698

SEQ ID NO: 1078 - protein, 1585 aa, human; identical to SEQ ID NO: 699

SEQ ID NO: 1079 - protein, 885 aa, human; identical to SEQ ID NO: 703

SEQ ID NO: 1080 - protein, 817 aa, human; identical to SEQ ID NO: 706

SEQ ID NO: 1081 - protein, 283 aa, human; identical to SEQ ID NO: 707

SEQ ID NO: 1082 - protein, 1025 aa, human; identical to SEQ ID NO: 708

SEQ ID NO: 1083 - protein, 1147 aa, human [sequence omitted]

SEQ ID NO: 1084 - protein, 676 aa, human; identical to SEQ ID NO: 716

SEQ ID NO: 1085 - protein, 386 aa, human; identical to SEQ ID NO: 719

SEQ ID NO: 1086 - protein, 927 aa, human; identical to SEQ ID NO: 726

SEQ ID NO: 1087 - protein, 381 aa, human; identical to SEQ ID NO: 727

SEQ ID NO: 1088 - protein, 88 aa, human; identical to SEQ ID NO: 653

SEQ ID NO: 1089 - protein, 1018 aa, human; identical to SEQ ID NO: 733

SEQ ID NO: 1090 - protein, 1109 aa, human; identical to SEQ ID NO: 735

SEQ ID NO: 1091 - protein, 272 aa, human; identical to SEQ ID NO: 736

SEQ ID NO: 1092 - protein, 767 aa, human; identical to SEQ ID NO: 740

SEQ ID NO: 1093 - protein, 64 aa, human; identical to SEQ ID NO: 743

SEQ ID NO: 1094 - protein, 227 aa, human; identical to SEQ ID NO: 747

SEQ ID NO: 1095 - protein, 175 aa, human; identical to SEQ ID NO: 750

SEQ ID NO: 1096 - protein, 48 aa, human; identical to SEQ ID NO: 751

SEQ ID NO: 1097 - protein, 35 aa, human; identical to SEQ ID NO: 752

SEQ ID NO: 1098 - protein, 1515 aa, human; identical to SEQ ID NO: 754

SEQ ID NO: 1099 - protein, 353 aa, human; identical to SEQ ID NO: 755

SEQ ID NO: 1100 - protein, 424 aa, human; identical to SEQ ID NO: 756

SEQ ID NO: 1101 - protein, 97 aa, human; identical to SEQ ID NO: 759

SEQ ID NO: 1102 - protein, 1827 aa, human; identical to SEQ ID NO: 758

SEQ ID NO: 1103 - protein, 105 aa, human; identical to SEQ ID NO: 762

SEQ ID NO: 1104 - protein, 18 aa, human
MIFSMILCCAIRRNREMV

SEQ ID NO: 1105 - protein, 172 aa, human; identical to SEQ ID NO: 768

SEQ ID NO: 1106 - protein, 605 aa, human; identical to SEQ ID NO: 770

SEQ ID NO: 1107 - protein, 665 aa, human; identical to SEQ ID NO: 771

SEQ ID NO: 1108 - protein, 595 aa, human; identical to SEQ ID NO: 774

SEQ ID NO: 1109 - protein, 1165 aa, human; identical to SEQ ID NO: 667

SEQ ID NO: 1110 - protein, 1935 aa, human; identical to SEQ ID NO: 633

SEQ ID NO: 1111 - protein, 1235 aa, human; identical to SEQ ID NO: 783

SEQ ID NO: 1112 - protein, 469 aa, human; identical to SEQ ID NO: 784

SEQ ID NO: 1113 - protein, 487 aa, human; identical to SEQ ID NO: 785

SEQ ID NO: 1114 - protein, 1305 aa, human; identical to SEQ ID NO: 671

SEQ ID NO: 1115 - DNA, 1382 bp, rat
gaattccggccttccctccgtggctccggcgctgcccggtcccctcgggcggcagctgccatgggcaccgacagccgcgcggccggagcacttctggcgcgggccagcaccctgcacctgcagaccgggaacctgctcaactggggccgcctgcggaaaaagtgtccgtccacgcacagcgaggagcttcgagactgtatccaaaagaccttgaatgaatggagctcccaaatcagccctgatttggtcagggagtttccagatgttttggaatgtaccatgtcccatgcagtggaaaagataaaccctgatgaaagagaagaaatgaaagtttctgctaaactgttcattgtaggatcgaattcttcatcatcaactagaaatgcagttgacatggcatgctcagtccttggagttgcacagctggactctgtcatcatggcttcccctccaattgaagatggagttaatctttccttggagcatttgcagccttactgggaggaattagaaaacttagttcagagcaagaagattgttgctataggcacctcggatctagacaaaacacagttggagcagctgtaccagtgggcacaggtaaaacccaatagtaatcaagttaatcttgcctcctgctgtgtgatgccaccagatttgactgcatttgctaaacagtttgacatacagctactgactcacaatgacccaaaagaactgctctctgaggcaagtttccaggaagctcttcaagaaagcatccctgacattgaagcccaggagtgggtgccactgtggctgctgaggtactcggtcatcgtgaaaagcagaggaatcatcaagtcaaaaggatacattttgcaagccaaaagaaagggttcttaactacagctcaagctcacaactcaggggccttgtatttatctggaacataagataaaaattcatgataaaattgagatgtgtaaaaaaaaatctagctctcgcctacaaaaagcgtcactgaggcgtgaatgtggtggtttggcaatgtgttgagtttaagtacctccctggcgtctgcagcagcgcactcacaggaagcattgtattctcttcattaaactcttggtttctaactgaaatcgtctataaagaaaaatacttgcaatatatttcctttatttttatgagtaatagaaatcaagaaaatttgttttaagatatattttggcttaggcatcagggtgatgtatatacatattttttatttctaaaattcagtaactgcttcttactctatacttctataactaagcaattacattacagttgttaagacatactggaagagatttttttcctgtcgtttgacaaaataatctatctcagagtcggaattc

SEQ ID NO: 1116 - DNA, 378 bp, rat
atgcctgagcccgccaagtcccgtcccgccccgaagaagggctccaagaaggctgtgaccaaggcccagaagaaggacggcaaggaacgcaagcgcagccgcaaggagagctactcggtgtacgtgtacaaggtgctgaagcaagtgcacccggataccggaatctcttccaaggccatgggcatcatgaactcgttcgtgaacgacatcttcgagcgcatcgcgggagagcgtcgcctggcgcattacaacaagcgctcgaccatcacgtcccgggagatccagacggccgtgcgcctgctgctgcccggggagctggccaagcacgcggtgtccgagggcaccaaggcagtcaccaagtacaccagctccaagtga

SEQ ID NO: 1117 - DNA, 462 bp, rat
tttttttttttttttttaaaagtagcaataagtcaaaaatttaatgaatctaaacaagttcgattaacatgcaaccacatttaacatgacgacttatcttagaacgtacaaaagattatgaaatcatgtttatttcttctttggtacaaccagacatgttatctcaaacttttaaaataaataatgtcagccacaaaacatatgcacgttggggtatcacttctttgctttcacgtggatcttacaatgcgagtgcgtttggagcgcagtatattcacaaattcagaataaagatgagaaccaccatctatagagaccacttctgtgacacggccctgatgaagattttaagcaccaattttgttgaatgtagtgggttttgttccttagcagtacttgacacaactgattgttcaaatctcaggtcaatatcttaattgaaaaacctcgtgccgaattctt

SEQ ID NO: 1118 - DNA, 434 bp, rat
tttttttttttttttttgggaagcaactgcttttatttgacagtggatgaggaggagatgggtgtcagaagagatggggagcattttctgtcctacgactaaatgacatgaatttactgtacaatgacagtgtacatggctagggtaagtagcgtcaccaaagattagttctctcgcttacactaagtaggcacgcacatcccaccccagcaccgacttcacagtcagctgtaaagagtggcatttcactggatgcctcgagagacagttctgttggagtatttgagtttaaagactttgaaaggaaagagaatttggctgaaaagtatccttttctttagttaaatcgaaacaagtctccagtcagcacccagtcaaacacagtgccttgaactttgggtaatttgtcggacagtatactccacgccactgtg

SEQ ID NO: 1119 - DNA, 406 bp, rat
tttttttttttttttttggcctctgtggtctttattagtgttttctgggaccatcaaacgaacaaaatagaattctttcattaaacaaaaatcgtttgaatttaacaccttaaggggaaagggttacgattttttttaaacagtagcagtagggttgttgcccaccaattatcaacccataagccagatggcaagaagaatgaggtttatatagatagctacagaatgattagttccaattcggctaaactctgaaatctacatgtctcaaaactttgtgagatacagttccagaagtttggttttcttaatggtctcccttattccagaaactgaatctgagcccccaactgaaaataactcacctgtgacacaaagtttgccatgctggtgtctccttctctta

SEQ ID NO: 1120 - DNA, 5925 bp, rat; identical to SEQ ID NO: 3

SEQ ID NO: 1121 - DNA, 502 bp, rat
cactggggcaggacaggcctcctgaggcctgaagttacaggttcttttcaggcactggacacaggaacggcagcaggcaacccttcccaggcagtacatcagcttgtgtgcagccagcagccagcctcctccacctccttggtcaccaccaatagcacctcgcacaggccttgagccaaggcagctgccaggaaggctctgacaccatcctcgccccccagggcttcaggtgcccgtagctttgagtccagattatagtagatgcagtccacctggcgcagggccacccagtgtcgccggcgcagcggcagggacagcagccccagcgacacaggagagggtaggttcaagatcaggcctagtacctggggcaggaccagctgggacaggggtctcctcctgtcccaccacacagcggccaggcccaggccctgcagggcagccatgatcacgttgacatcatagttgccggtgcccaagaaactgcgatgggggttcagcc

SEQ ID NO: 1122 - DNA, 441 bp, rat
ttttttttattttttttaggaatcacataatggcatttatttcatatggggctctgtacaaaacatctacacacattttacagagtaagtaaatacctgacggtgaactgacaatactttcttctcagtggcaggggagtcctgctatgggcacagcacaactcatcacaagccattgccgcctgcttgtttggatagactaatggcttggaccctgagcccagggcctccctcagccagcacactccccacagtcttcaagcaggcaagaggcatatgtggtacactcccatggtagactgatagttatctgtctaaagacactccagactcggtgctgtaacgagggcagtgattgggtagccaggtgctccagagccacttctgacaggaggaggtgcagggagcactcaggtccggtaagcccctcgtgccgaattc

SEQ ID NO: 1123 - DNA, 737 bp, rat
cctgtatgaaagttccgagcttgcagctgtagggaaccacgtaaggccagggcgcgtttccggtgcgggcagtcgccaccagagttaaagaccgggcgtcagaaggggaccatggccaacagcgagcgtaccttcatcgccatcaagcctgatggggtccagcgggggcttgtgggagagatcatcaagcgattcgagcagaagggattccgcctggttggtttgaaatttatacaggcttcagaggatcttctcaaggagcactacattgacctgaaggaccgccccttcttttctggcctggtgaagtacatgcactcaggaccggtggttgctatggtctgggagggactgaatgttgtgaagacaggccgggtgatgcttggagagaccaaccccgcagactctaagcctgggaccatacgaggagacttttgcattcaagttggcaggaacatcattcatggcagcgattctgtggagagtgcggagaaggagatcagtttgtggtttcagcctgaggagctggtggactacaagagctgtgcgcagaactggatctatgagtgacagcagggcccctgctttttttctgtctactgacccttgatctcacaggcaggggagcagcagctctagatctttctggaacttctctgaactggaagaagcctctgggcgctgtgactccctgtgcagtgttaagtgccactggtagattaaagtgttttgtctgt

SEQ ID NO: 1124 - DNA, 615 bp, rat
ttgggatacacaggcacaggcacagtcactcgggggactggcgtgccccacggaaccaaggatgggcttttataggattttggggagcagaagcaagcatacacaagcagatgcatggttacagggatataattggtggattctaatatggcaagggtttagcccgggggcaagtttcctagctaccttcctgaaacataacgactgactcggcccccccaagggttcagcctgggggcaagtttcctagctacctttctggaacataacgactgactcggccccccaagggttcagcccgggggcaagtttcttagctacctttttggaacataacggctgactcggccccccaccagggtgtgggacctctcccggggcttttctcattgtcaggtgctcaactgcagtcgtcctgttgccaggccttcaaccaaacacatcttgcttggcagccgctgtgtactcagtgttctaacctttctctgaaccagtcatcttaagtacagccttgcaaaatggcgttactgctgctaagctggggtctttcattcccccattttttttttttttgctaactttgagtgaaatctttcactcgacttggtcaaaaaa

SEQ ID NO: 1125 - DNA, 787 bp, rat
gcacttctcggatcctcagcccagtgcttctagatcctcagccctgaccagctcagccaagaccatgaccgagcgccgcgtgcccttctcgctactgcggagccccagctgggagccgttccgggactggtaccctgcccacagccgcctcttcgatcaagctttcggggtgcctcggtttcccgatgagtggtctcagtggttcagctccgctggttggcccggctatgtgcgccctctgcccgccgcgaccgccgagggccccgcagcagtgaccctggcccggccgttcagccgggcgctcaaccggcaactcagcagcggtgtgtcagagatccgacagacggccgatcgctggcgcgtgtccctggacgtcaaccacttcgctcctgaggagctcacagtgaagaccaaggaaggcgtggtggagatcactggcaagcacgaagaaaggcaggatgaacatggctacatctctcggtgcttcacccggaaatacacgctccctccaggtgtggaccccaccttggtgtcctcttccctgtcccctgagggcacactcacggtggaggctccgctgcccaaagcagtcacacaatcagcggagatcaccattccggtcactttcgaggcccgtgcccaaattggaggcccagagtcggaacagtctggagccaagtagaagccttcagcttgctacccatccccagtagccgtcaccagccctccctctctgtcaatctgaatgctcttttgatacatgtactttctgttttactcaaataaa

SEQ ID NO: 1126 - DNA, 552 bp, rat; identical to SEQ ID NO: 92

SEQ ID NO: 1127 - DNA, 1753 bp, rat
tttcctccctacttgtgaacaatgccaaagaaagtgaagcccacaggggatgagaatgaagaagagtctgttccttgcaagcaggtgaaagaggagctacctaatacgctttctgtattaaactttgacagccccagtagtttctttgaaagtttaatatcacccatcaaagtagagacatttttcaaggaattctgggaacagaagccccttctcattcagagagatgacccttcgctggccgcatattaccagtctctgttcagcctctcagatctgaggagtctctgcagccaagggctgtactatggaagagatgtcaatgtctgccggtgcatcggtgggaagaagaaggttttaaataaggatggcaaagcacagtttcttcagctgagaaaagattttgatcagaagagggcaacaattcagtttcatcagccacagagatttaaggatgagctctggaggatccaggaaaagctggaatgttactttggctccttagtaggctcaaatgtgtacatgactcccgcaggatctcagggccttcctccacattacgacgatgttgaggtttttatcctgcagctggagggaaggaaacgttggcgcctgtactccccaactgtgcccctggcgcgtgagtacagtgtggagcctgaggaccggattggcacaccaacacatgacttcctgctgaagcctggcgatttgttgtacttccccagagggaccattcaccaggcagaaactccttcaggcctggcccactctattcacctgactattagcacctaccagaacaattcatggggagattaccttttggactccatttcggggcttgtatttgacattgcaaaggaagatgtggcattaaggactggaatgcccaggcggatgctcatgaatgtggaaaccccagctgacgtaacaaggaagttgagtggctttctgaggactctggcagaccagctcgagggcagaaaagaactgctctcatcagatatgaagaaggacttcgtcatgcacagacttccccctttctgtgtgggaaatggaacagagtcaatgaacccaggtggaaagttgccaaggttgaacagcatagtaagactgcagtttaaagaccacattgtcctcacagtagggcccgatcagaatcaatctgatgaagctcaacaaaaggtggtttacatctaccattctctaaagaatgagagacagacgcacatgatggggaaagaggtggaaacagagatttatggacttcgctttcctttatcctatgtggacgctctgaagcaaatctggtgcgggtcaccagttcgtgttaaggacctgaaacttggcacagatgaagagaaggagaacctggcagtgtctctctggacagagtgtctagtccacgtgctctagtgccttatgcagagaactgttgtactttcagtgaggggaacttaatcccgagggcacttggtgttctgattagtgctctgggtggagctgtggttggttacagagaagaggcaggagaaagaagctggttcatgtcctcatggacaggagagggaaaacaggaaattattaggcatcccaggctgtgataaaatgatactttggacaagtttatttaatccagtgttgtagaaaaggcacaactccagtacatacgtcatatagaattatgtcattaacctggcttctttgtcttggttctttggaaaaaataactcctttaaagagcatcatt

SEQ ID NO: 1128 - DNA, 277 bp, rat
tttttttttttttttttaaaaaaattaaatatttatttgaataacaacttttatgttggagctgcaacgttggcaatgcaggtttttaacacaaatcacaaaatgcgtgcacaaaaaggtacgggcgcaaggacaaaatgatgctaagaattgggctaaagagctgctgattttaaacaagaggcctgaaatcactatacaaaatataaaatgtattaaacactaccatccacagaacagtctttagtattgatcatatttaaaaatcatttgcgaa

SEQ ID NO: 1129 - DNA, 2320 bp, rat
gtatttcataaaacagagaggatcgcaggaggccggcactctgactcctggtggatgggactagggagtcagagtcaagccctgactggctgagggcgggcgctccgagtcagcatggaaagtctctgcggggtcctggtatttctgctgctggctgcaggactgccgctccaggcggccaagcggttccgtgatgtgctgggccatgagcagtatccggatcacatgagggagaacaaccaattacgtggctggtcttcagatgaaaatgaatgggatgaacagctgtatccagtgtggaggaggggagagggcagatggaaggactcctgggaaggaggccgtgtgcaggcagccctaaccagtgattcaccggccttggtgggttccaatatcaccttcgtagtgaacctggtgttccccagatgccagaaggaagatgccaacggcaatatcgtctatgagaggaactgcagaagtgatttggagctggcttctgacccgtatgtctacaactggaccacaggggcagacgatgaggactgggaagacaacaccagccaaggccagcacctcaggttccccgacgggaagcccttccctcgcccccacggacggaagaaatggaacttcgtctacgtcttccacacacttggtcagtattttcaaaagctgggtcagtgttcagcacgagtttctataaacacagtcaacttgacagttggccctcaggtcatggaagtgattgtctttcgaagacacggccgggcatacattcccatctccaaagtgaaagacgtgtatgtgataacagatcagatccctatattcgtgaccatgtaccagaagaatgaccggaactcgtctgatgaaaccttcctcagagacctccccattttcttcgatgtcctcattcacgatcccagtcatttcctcaactactctgccatttcctacaagtggaactttggggacaacactggcctgtttgtctccaacaatcacactttgaatcacacgtatgtgctcaatggaaccttcaactttaacctcaccgtgcaaactgcagtgccgggaccatgcccctcacccacaccttcgccttcttcttcgacttctccttcgcctgcatcttcgccttcacccacattatcaacacctagtccctctttaatgcctactggctacaaatccatggagctgagtgacatttccaatgaaaactgccgaataaacagatatggttacttcagagccaccatcacaattgtagatggaatcctagaagtcaacatcatccaggtagcagatgtcccaatccccacactgcagcctgacaactcactgatggacttcattgtgacctgcaaaggggccactcccacggaagcctgtacgatcatctctgaccccacctgccagatcgcccagaacagggtgtgcagcccggtggctgtggatgagctgtgcctcctgtccgtgaggagagccttcaatgggtccggcacgtactgtgtgaatttcactctgggagacgatgcaagcctggccctcaccagcgccctgatctctatccctggcaaagacctaggctcccctctgagaacagtgaatggtgtcctgatctccattggctgcctggccatgtttgtcaccatggttaccatcttgctgtacaaaaaacacaagacgtacaagccaataggaaactgcaccaggaacgtggtcaagggcaaaggcctgagtgtttttctcagccatgcaaaagccccgttctcccgaggagaccgggagaaggatccactgctccaggacaagccatggatgctctaagtcttcactctcacttctgactgggaacccactcttctgtgcatgtatgtgagctgtgcagaagtacatgactggtagctgttgttttctacggattattgtaaaatgtatatcatggtttagggagtgtagttaattggcattttagtgaagggatgggaagacagtatttcttcgcatctgtattgtggtttttatactgttaatagggtgggcacattgtgtctgaagggggagggggaggtcactgctacttaaggtcctaggttaactgggagaggatgccccaggctccttagatttctacacaagatgtgcctgaacccagctagtcctgacctaaaggccatgcttcatcaactctatctcagctcattgaacatacctgagcgcctgatggaattataatggaaccaagcttgttgtatggtgtgtgtgtgtacataagatactcattaaaaagacagtctattaaaaaaaaaaaaaa

SEQ ID NO: 1130 - DNA, 504 bp, rat
acaacaacaaaattaggtaaacaaaaaggataaatttattttaaaaattccaggtgatgtcccaatgtctgtgagtgttccgtatcttgtaccttccatgactacattcagttacagttgttgagtaaaacacaaggcatgtgaatgccccaaatgtcaaaagcactaacttacctctggcatgcaatactggttaaggaatggttactacatccagtctttactcatcttcagttaagcagaatcacacgttccatggatatttcagctaactgagggttagacccataggatcatggtactcaacagactgaaaacagttccctttcttcaataagttcttcaataagtccctgccctcttgaaaatacaaaatattacttttgatgaaaacttttatatcctatttagaaaaattcttaagttgacacttaaaagaattttcaataatttcccacaaccatctgataaactgataacgccttaagcttaattatacaaggg

SEQ ID NO: 1131 - DNA, 654 bp, rat
ttttttttttttcttttaatttaaagccacaatacacagaggaaaaagaaatgcaaaaaaatctctccgtgcaaggacaaagaggcctttaaccatggtgcttgtgaacgctttctgaagctttaccagctacaagttgggactttggagaccagaaggtatacagggccgaggagcctgcacctggggccgctcggtccagcctggtttagcctgggtgtcactgggtgtggtgatcccagacacatcgcactgtggattgtttcctttttaaatgaacggatgacatgtagcagagagccgcgtctgctcagagagagaacatcgatgcagtgcgttcggaggaaaaacaaaaacaccagaaaacctttttgttcaagcttgtcaaaccaacaacctgccaacagagaaaaagagtgtggacaaggggacttaaaaatgacattcagtatataaaacatgtacataataacgagtgactaactatcaaatagatggatttgtatcaataccaaatagcttctgtttttgttttgctaaaagctgaacgttcagcgctatgcaattctcgatttttagtacattgttaccagtttccgatcaccttcagagtaagctttcctcaccccaggattttgttgcttaaaaatactg

SEQ ID NO: 1132 - DNA, 569 bp, rat
  misc_feature (512)..(512): n is a, c, g, or t
caaatttcagccataactgaaagactttattttaagaaaaatttacagcaaaacagaacttgaagttagcgggtttagaggatatggcaaaacataattaccagaaaagctgcccaagcattgatggcttcttgctagatagaggagagtgagtggcaggccctaacctcactcacctttcctgattcagagaaccttgacccttttaaggctgggcccaggaaccccattttccaatttctcccttcttggagtttagaaaggtttatcttatctgtcaggcttccaagatacagaagatagtacggagaagggaaaaacattctattagttccagtgccttccctcaatgcctgcagacctatcagcccgtctttcagtatttgttgattccaaagaggcgaaccccatgggactggggcagcttaggcagcagtacgctgagcagtgaggcagtgttgatgaggaaatgagcagcatcatacttggcgtagaagctggccagtaggtanagtacaataggggaaatgctgaggaactttcgtgaggaagtaaactgtagtccgtag

SEQ ID NO: 1133 - DNA, 2383 bp, rat
ctctgtgagacacctgaccgaccgctgagcgactgactggtccacagcgccggcaagatgaagttcactgtggtggcggcggcgctgctgctgctgtgtgcggtgcgggcggaggaggaggacaagaaggaggatgtaggcacggtggttggcatcgacttggggaccacctattcctgcgtcggtgtattcaagaacggccgcgtggagatcatagccaacgatcagggcaaccgcatcacaccgtcgtatgtggccttcactcctgaaggggagcgtctgattggcgatgcggccaagaaccaactcacgtccaacccggagaacaccgtcttcgacgccaagcgcctcatcggacgcacttggaatgacccttccgtgcagcaggacatcaagttcttgccattcaaggtggttgaaaagaaaactaaaccatatattcaagttgatatcggaggtgggcaaaccaagacatttgccccagaagaaatttctgctatggttctcactaaaatgaaggaaactgccgaggcgtatttgggaaagaaggtcacccatgcagttgtgactgtaccagcttacttcaatgatgcacagcggcaagcaaccaaggatgctggcactattgctggactgaatgtcatgaggatcatcaatgagccaacagcagctgctattgcatatggcctggataagagagagggagagaagaacatcctcgtgtttgacctgggtggtggaaccttcgatgtgtctcttctcaccattgacaatggtgtctttgaagtggtggccactaatggagacactcatctgggtggggaagactttgatcagcgggtcatggagcacttcatcaagctgtacaaaaagaagactgggaaagatgtcagaaaggacaacagagctgtgcagaaactccggcgtgaggtagaaaaggccaagagagccctgtcttctcagcatcaagcgaggattgaaattgagtccttcttcgaaggagaagacttctcagagacccttactcgggccaaatttgaagagctgaacatggacctgttccgctctaccatgaaacctgtccagaaagtgttggaagactctgatctgaagaaatctgatattgatgagattgttctggttggcggatctactcgaattccaaagattcagcagttggtgaaagagttcttcaatggcaaggagccgtcccgtggcatcaacccagatgaggctgtagcatatggtgccgctgtccaggctggtgtcctctctggtgatcaagatacaggtgacctggttctgcttgatgtgtgtcctcttacacttggtattgaaactgtgggaggtgtcatgacaaaactgattccgaggaacactgtggtgcccaccaagaagtctcagatcttctccacagcttctgataatcagcccaccgtaacaatcaaggtctacgaaggtgaacgacccctgacaaaagacaatcaccttctgggtacatttgatctgactggaatccctcctgctccccgtggggtaccccagattgaagtcacctttgagatagatgtgaatggtattcttcgagtgacagctgaagacaaagggacaggaaacaaaaacaaaatcaccatcaccaatgaccaaaaccgcctgacccctgaagaaattgaaaggatggtcaatgacgccgagaagtttgctgaggaagacaaaaagctcaaagagcgcattgacacgaggaatgaattggaaagctatgcttactctcttaagaaccagatcggagataaagagaagctgggaggtaagctgtctcctgaagataaagagaccatggagaaagctgtagaggaaaagatcgaatggctggaaagccaccaggatgcagacattgaagactttaaagctaaaaagaaggaactagaagaaattgttcagccaattatcagcaaactctatggaagtggaggccctcccccaactggtgaagaggatacatcagaaaaagatgagttgtaggtgcactgatctgctagagctgtaatattgtaaatactggactcaggaactttcgttgggagaaaattgagagaacttaagtctcgaatgtaattggaatcttcacctcagagtggagttgaaaatgctatagcccaagtggctgtttactgcttttcattagcagttgctcacgtgtcttggggtcagggagaggaggaattggctattttaaaattggggaaaagctgggtcagggtgtgtgttcaccttggatatgttctatttaacggttgggtcatgcacatctggtgtaggaacttttttctaccataagtgacaccaataaatgtttgttatttacactggtctagtttttgtg

SEQ ID NO: 1134 - DNA, 2072 bp, rat
attcccgcatcttattagcaaccagggagatttctccattttcctcttgtctacagtgcggctacaaatctgggattttttttattacttctttttttaaaaaactacacttgggctccttttttgtgctcgacttttccacctttttcctccttcctggcctgctgctttttgaggcggggggcaagccttcctcggggcagccgcgtcccgggtcccgccgcgatgctgttccacagtctgtcgggccccgaggtgcacggggtcatcgacgagatggaccgcaggcaagagcgaggctccggcatcagctccgccatcgaccgcggcgacacggagacgaccatgccgtccatcagcagtgaccgggcagcgttgtgtgctggctgtgggggcaagatctctgaccgctactatttgctggcagtagacaagcaatggcacatgcgctgcctcaagtgctgtgaatgcaagctcaacctggagtcggaactcacctgcttcagcaaggatggcagcatctactgcaaagaagactactacaggcggttctctgtgcagcgctgcgcccgctgccacctgggcatctcggaatcagagatggtgatgcgcgctcgggacttggtttatcacctcaactgcttcacatgcacaacgtgtaacaagatgctgacgaccggcgaccatttcggcatgaaggacagcctggtctattgccgcttgcacttcgaggctctgctgcagggcgaatacccaccacactttaaccatgccgacgtggcacgggcggcagcggcagccgagcagctaagagtgcaggattgggctcagccggggctaacgctgggtcttccctactacaacggcgtgggcactgtgcaaaaggggaggccgagaaagcgcaagagtccaggacccggggcagatctggcagcttacaacgccgcgcttagctgtaacgagaacgatgcggaacacctggatcgtgaccagccctaccccagcagccaaaagacaaagcgcatgcgcacctccttcaagcaccaccagcttcggacaatgaagtcttactttgccattaaccacaatccggatgccaaggacttgaagcagcttgcgcaaaagaccggcctcaccaagagagtcctccaggtctggtttcagaatgcccgggccaagttcaggcgcaaccttttacggcaggaaaacacgggtgtggacaagacttcggatgccacgctgcagacagggacaccgtcagggcccgcctcggagctgtccaacgcctcgctcagcccctccagcactcctacaaccctcacagacttgactagccccaccctgccgactgtgacgtcagtcttaacttctgtgcctggcaacctggaggccacgagccccacagcccttcacaaacgactcttaccaaccttttctaatgactcgccacccccttctcccctgagcccccacgctttctttaaaaaagaaattatctttagttgaattccaagtgtattttaaaaatagcggtttgagcaactaactaaccacgttttaggatctcgcctggaaacagagggaaaaaagaattgtgcgtcgggctaacgcagcggtgtgtgctgaggaattacttgggagatatatctgcaacacaacatttgtgtccctgtacagttttgtggactgagcgaggaaaacaacaaataatttaagttggctgagagcttccgtattttcaaagactgccacgtgccttaggaatactgttttatcttcatactttggatgaattgttcgtttttttttctctccctctttttctctcttatatttatgaccagagaaaaatgtaaaaaaaggaaaaaaaaaaaaaaaaaacaaaaaaagtttgttactttgaatagtcctaaagaagaaaaagaaaaaaaaaaaaaaataaggaaaaaaatcaaatcccctccaacagtcgctttcttgttttagaattttaaggtggaagtctgttcggatatagaatttgtaaaacctaacctgtaataaaatcactcttcgaaaagaaaaaaaaaaag

SEQ ID NO: 1135 - DNA, 2721 bp, rat
gcggccgtcggcggacgcgggaagaagtgtcttgtaggcgcggcgccccactcagccccggcccccctcatccgcgtactcggctgatgcctcagggcgtcagctcggcggagaggcggtcgaggcgtgcgcctggctagcagttggctttccccgtgactcggacacgtttgcagtcgaataaacttgcgaccgccacgtgtggcatctctccaaggaaccggctcaggaggagggcgcgcccatcgtgggatcgcgcggggcgcccggcagggcggcggcgacagcggcagagccggccgcggctgctgcgtgcggaggcgctgccggttacgtaaagatgaggggctgaggtcgcctcggcgctcccgcgagtcgcaagctcccgcgcccccgccccctcggccgcgccgcaccgcgctcgtcgtccgagaccagggcagggctagccgaagctccgcagccaccctcaagtttggccgcaccgcccgggctgccgtcgcccgcaccatgtccgcggccgcctacatggacttcgtggctgcccagtgtctggtttccatctccaaccgcgccgctgtgccggagcacgggggcgctccggacgccgagcgactgcgactacctgagcgcgaggtgaccaaggaacacggtgacccgggggacacctggaaggattattgcacactggtcaccatcgccaagagcttgttggacctgaacaaataccgacccatccagaccccctcggtgtgcagcgacagtctggagagtcccgatgaggatataggatccgacagcgacgtgaccaccgaatctgggtcgagtccttcccacagcccggaggagagacaggattctggcagcgcgcccagcccgctctccctcctccactctggagtggcttcgaaggggaaacacgcctccgaaaagaggcacaagtgcccctacagtggctgtgggaaagtctatggaaaatcctcccatcttaaagcccattacagagtgcatacaggtgaacggcccttcccctgcacgtggccagactgccttaaaaagttctcgcgctcggacgagctgacccgccactaccggacccacactggcgagaagcagttccgctgtccgctgtgtgagaagagattcatgaggagtgaccacctcaccaagcatgcccggcgccacaccgacttccaccccagcatgatcaagagatcaaaaaaggctcttgccagccccttgtgaggtgctccccatatggcaaccaggcagagatggtcccggaaggacagagctcccaggaaacagacggacacatggaaatctgccaccgcagagttgtgctggccacaggaggtcactgctctttggtcaatattctgacactctccctgcgctgtttccaaaaagcacacggtagcctaagatcaaagtcaacatttggtccccttgcagaggccactctgaaccgtctctgactgttggagggcaggcaaataaatgcttttggtattttctcctttgttttggggggtggggggagggggcaaggccaagacttggggtaggatttttgaagattcaggctggtgtacatacgtctgactgggtgagttgacccctggcctcccacagtgactctggatccttgatgcttgctgactctcagaattgtttttcttctctctcaatgtcacgaccagagtgcttcagcttgtttagcagagccactctcgaatcacgttaacttttgagatttaaaaaacaaaacaaaacaacaaaaaaaaaaaaaaacccctccatagcacagctgtcttttatgcaagcaagagcacacctactccagcatgatctgtcatctaaggacttcaaaacaaaacaaaacaaaaaaaaaagttacttatagtcagtggataagcagagtccgaatttacactaaacaagacagaccttcgaggggtcataagtccggaactttcaaaccttgcttcgtatgaatcgtactatctgaacataaactgcacttttattttctaataccgagggtgaatacggtaaatccatgccttgagggtagaagccgacattctgtttggcacacgttattatctgcttattttccaggatacacatttccctgagaacccacggcagagatgtgagggcagaatgtatggaaacacatgctgaggaggggaaggaggaggggagtgctttaaagatacaaaaaaaaaaaaaaaaaaaaaaagagcaaacaattttaacttcatgaatttgtttgaattttcccaagcttcagataacaacgccactcacgggactaggacgctgcaagagcattgggctctgtgtagcattagctgataaatgggtgtatagccatcaccagacctggaaatgcccccttttggtgggggtgggggtgtttcttggtctctctttcgttcctatgaaatttccactaagaggtgcaagagttatatcaaaggaaagggaactgaaatatggaaaaaaaaaagtttgcccctgtaagtagtctctagggaaggaagatgccacaatggtttcagaggcgactctgcagaacagtcccttctgctgaacataggtcagagaaacactcgtgaatggcatcacatcgccaactgtctgcatcatggcccaccactacttagcttgtatctcggtgtctacacaatggcctgaaccactggtcaccat

SEQ ID NO: 1136 - DNA, 1039 bp, rat
gaaacgcctcctcgttttgctcagcatggcacatttgagtatgaatattctcaacgatggaagtctttggatgaaatggaaaaacagcaaagggaacaagttgaaaaaaacatgaaggatgcaaaagacaagttggaaagtgaaatggaagatgcctaccatgaacaccaagcaaatcttttgcgccaagatctgatgagacgccaggaagaattaaggcgcatggaggaacttcacagtcaagaaatgcagaaacgtaaagaaatgcagttgaggcaagaggaggaacggcgtacaagagaggaagagatgatgattcgccaacgtgagatggaagaacaaatgagacgccaacgagaagaaagctacagcaggatgggctacatggatcccaagagaaagagacatgagaatgggtggtggtggaacaatgaacatgggagatccctatggttcaggaggccagaaatttccaccgctaggtggtggtggtggcataggttatgaagctaatcctggagttccaccagcaaccatgagtggttccatgatgggaagcgacatgcgtactgagcgctttgggcagggaggtgcgggtcctgtgggtggacagggtcctagaggaatggggcctggaacgccagcaggatatggtagagggagagaagagtatgaagggccaaataaaaaaccccgattttagatacttaggctttcattccagtttggttttgtcttcttgtttagataccacttaaattcttggcattttagtaagaaagctacctttttatggatgttagcagtttattgacctgatatttgtaaatggcctgtttgggcaggtaaaattatgtaacgcagtgttcaaaacaggagaaaaattttttcatttactttttttttaactgtataatgtttctcaagttaatggcagtgtaccttgtgccactgaatttccaaagtgtaccattttttttttactgtgcttcaaataaatagaaaaaaatagttatgaacaaaaaaaaaaaaaaaaaaa

SEQ ID NO: 1137 - DNA, 560 bp, rat
cattgagaaagcatagctattgtgaaataataattcgccagaaattacatctaacatctagcgctgccaaatagtgtcactgtactattttatatcattcgaaatggaattcaattctgtaactaacaactgtcctactaggtgagagagaaagattatgtgagaaaatcagaataccatgtgatttgtagatttgggacgttcagaaacattgggaactaaatttagaatgggccaaagcctggaagatgggtctcacaccagaagacattccaggagctagccattttaggagatgtccctccaaagtgtcgcgatgatggccttgcacttgggaatcaggttctgctcacttggacatccctgcgtcatggactcttgctgcccccgttccatgtgctcgcaattccagctactggaagccaccaggaatgctttctaattatcatttgcaactagaactgtaatcagaaagaaaatttgtatttttgtataactcgattgtgtgccattttatataacaggtcctgttttacaaataaattttgttttactaactt

SEQ ID NO: 1138 - DNA, 523 bp, rat
aatgaaaattatttaacttagaaatctgctctgaaacttttgtctagttttgcaaatctcagatattccagtgcaaaaatagatccattacagacagcataaagtgcttgggatgagggccaatgataaagaaaaagcacaaaaacagcttcatcctagggtacacggggaaagaacataccgcatccttatatggaaatataaatgttctacaaaaagggacgcaacaattttcaatcggaacagtattactgtggcattacactattaccagttaatagtaacgagagtacaaattagtatttcagtatcaaagtggttccccattacacaacacatggctctttggaacaattttacctgatatatacaaccgtgagaagacaacagacaatccctttaagtcaatgcctgcttacagagagcgattgatgtatgacattgtcatgaggcatatgtttgcagtacagacacctaaatacagtagtttgaggtttccttgtttgtttcaaaatgaattgcg

SEQ ID NO: 1139 - DNA, 372 bp, rat
tttttttttttttttttccctgcctccagtgtttatttggtcccagctacttccctcaccagactcatgacacagggctcgaggcctccagaaggtcaagggcaggcaggagatgggatagggagggtagaatatgttctttaggtacagcatctctcactgaggagtccagaggctccgcacctaccaccaggaagctgtgcatacccacagcccgagccccctggtaatcacagcggtaactatccccaacgtgagctgccgccgaaggctctacacaagcgagttgcaaagcctcacggaaaatccgaggatccggcttaggacagcccacagcctcagaagtcaaaacaaaatcaaaatgttctctca

SEQ ID NO: 1140 - DNA, 195 bp, rat
actctcactatgaatcctgtgtggagagggaatgtgacattttaaagttatttcttttgagagacttgttttggatgctcccccaagcctccctctcccctgcactgtaaaatgttgggattatgggtcacaggaagaagtggtttttttagttgaatttttttttttaacattcctcctgaatgtaaatttgta

SEQ ID NO: 1141 - DNA, 512 bp, rat
ttgtcttaacacttttttattgattcatttgtgtttacccatgtttcccctcatttaaaaaaaaaaatcagtgtttctaatttcttggattttcaactttaagttccacgttgacaaatctatttttatgtacacctttgattcttacattacaacagaagtcacatgtttaaaaatacccactccttaaaacatagtcattgtcaatattttgtttacagtacagatcctgaagacaaacacttgactatattaagatttattagtctgaaaacagaatgtaggatattttgtatataccgtcggtatatactgaattctggcagcaaagtgtttatgagaaaatttcaattttccctggtagtataatataaaggccaatctacttctcacttgttacaactatatttaactgaattatggtttaaaatcacaaagtgataaaatataaatacaaaatactaagaaaagtttaacatataaagagaaagtgtcttatgtattgtaatttt

SEQ ID NO: 1142 - DNA, 498 bp, rat
ttcttttacaaaaaaaaatataataacttagtttgcattttacaacatttccaatgggtcagggcatccttgaatgggacctaaggggtcagagcagcatgtacctcccttcccagttcaagcaccaggcggggctcatgccaccagtctgcaatctctatcgggatttgatagagcaactgagccatggctcatctgaaggacagcagtacggtgtcaccctgcaagtcactccatatttatttcacaagggtttatgcccctttcttctgctttcctgtacatcttttgaaagtcactaaagcgtggggcacatccaagttgtgcctccccaaagtgcacatgtccagtgaagaggaattctccatgccctggtcgtactccacactgcaacagtgttgtgacatggcccagccagtggccactgtcctcaggagctggctggaaaaccctgctcttctgcctgtggagcctgctcacccgtaggtgaatgactga

SEQ ID NO: 1143 - DNA, 689 bp, rat
tttttttgtaaagatataaaaagggaacactgattttaaaaaacaaaaacactcctcgctttcaaaatattggccatgatttctctttttctagtatgtgacattggctctgttgccccatggcacagaagttcatggtctgttcttttaattcccttcaaaacaaaacaccttggaaagaccatgcctgaaggtcacttagaccccgactcaaaaaaaataacaacttcttcatttccaacatctgggaaagtgggccaggtctgaatgttttgagcgttccgacattcacccagcaaacactcctatatcacggtgcgggcactggtctgcaccccttgaggctggagacttgcctactgattgccacccatctgtggagtcagaggcgggggtgtacccactccccactggagagactgagtctctgaaacattggagttcaagcagagaggcagaaagcgttgagtagtacagatgagtcgtccctgaaggctcactgcacgttgttgttgttgttgttaaggacgcagggatccacctcagtgtaagtgggcggaggcatgaactggaactcgggggcgtacataaagatagggctgtcttgagaatcatccacatcatctagcaggggggtggtggggctctccaatctgtgatcttcaggaatcacgtccatataacaaggt

SEQ ID NO: 1144 - DNA, 591 bp, rat
attcttgctaaaacacctcaaattttactcattttacaaaagtcctaagtgacagacacacagctacagaaaaaacagagcttagcttagcttaaatcctttaaagtcggaatggtcacatggaaagtcatcgtggattcttatgtttactataaaagttaaagtcaaaagtatacattaggatctgaagtgttctcttctttctagagatgtgacacacatgctttctggttggtggccgtccaccaaagatgacagatgaccagaaaaactgtgtcctggcccttccaaccagaccgagctggatcaggggagcattaacttagcaggagacactgtatgaaaacaaacaccaaagtcccaaccccccagtaaaaacccccgctctccggcctgcacgaaggattgcacgcaagcatgcacaagcacacccagcacgccattggacagcatggcacacaaacatgcacggacacacccagcatgctatcccgacagagctgtggcccgttctagcacacagcctgtttgtactggtgcccagcgagaggacaccattggaaagcagtttgcactcacaacacttataac

SEQ ID NO: 1145 - DNA, 629 bp, rat
ttttttttttgcactgtggtatcctttatttaaaaattgtgagttaactacagccatagagttcttgttcaccatttagatggcataataaactgagagaacaataacacaatcccaagaaggcattaccctataaacacacgtatgaccacccatgcacacatacacacaacatacacacaaagattataatataaacaccaagtgatgaaaaaaacactttgaatgctctaaatcaaattaaaacccctttattataataaaccgtggcaatattgtgactataatgaaagatattgtaactgcttaagaagaaaaacaggggaatactggcaatttagcagcagcaaacagccaaggaagggtggaagctaagcagacgaagcagcatctctctctaatgttggcactgtgtaggactgcacggaagtagtttaagttcagtttttaaggaactattaaaacatcctttgaaatactaatttgctgcactttacaaacagtggaaaagaaaaaaaaagtatttggaatgttagacacgcacgcacacgcacacacagaggaaacatactaagatattggtttatggtctttgtttatgacctccaaaaagttttataaggaaaaat

SEQ ID NO: 1146 - DNA, 536 bp, rat
aaaaaaagtaagaataacaaaaacaaattttaacaaaagtcagggacagttttttcaagcaacaaaatcctggggtgaggaaagcttactctgaaggtgatcggaaactggtaacaatgtaataaaaatcgagaattgcatagcgctgcacgttcagcctttagcaaaacaaaaacagaagctatttggtattgatacaaatccatctatttgatagttagtcactcgttattatgtacatgttttatatactgaatgtcatttttaagtccccttgtccacactctttttctctgttggcaggttgttggtttgacaagcttgaacaaaaaggttttctggtgtttttgtttttcctccgaacgcactgcatcgatgttctctctctgagcagacgcggttctctgctacatgtcatccgttcatttaaaaaggaaacaatccacagtgcgatgtgtctgggatcaccacacccattgacacccaggctaaaccaggctggaccgatcggccccaggtgcaggctccttggccct

SEQ ID NO: 1147 - DNA, 490 bp, rat
catttcagagttttattgtgttgcactgaaggaacagcggggcggttacacagttctctcattcgttttttgaaaatctaaagtacttgcaaattcttaataccttgaccactggattagaacagtaagcattaatataaccgatttcttagataataatgtcttacaaataaaaagccatttaaaatagctttaagtgcattctttacaggtaactcggcatgtgtattagcacttaggcttaagaattacagcaagtgtattactctggtggagtgagggagacccctctcatgcaatacatagggataatattcaagtcgacagcgaacgagatcccactcctcctacagctgtgtccatgtataatcatctacggtgataagcaggaaacctacgatgcttcccacgcgtcagatacacactttcagttcaccagaagcacctcattatctacggttaatttatatttagatggcatttcaataaa

SEQ ID NO: 1148 - DNA, 369 bp, rat
tttttttttttttttttcaaaaaacacgctagtcattaaagggcagcagatactactgagggccacagccaggaaggcagcgggtccagaggaactgccccaagcaggaaccaaagggagccccacctgcaccttcacaaacaaggcaggagctccaggagcggccaaggggcgctgtggaggagaggcagccggctttcttccctatctttagcctatttctcttccttgaacatgttttaggacaataaatttcaaaatacataccaattaaaatatcacacaccagtccttttactttatcaaaatgcctacaagaccagatgacctgaaagcctgaggtgagacagcaaggacaaaatcctttac

SEQ ID NO: 1149 - DNA, 472 bp, rat
tttttttttttttttttcctggtgaccttcaatgatcaattttattataaagaacagtatcaaaatatacaaatctgcttatgaaccaccaagaaatgcagctttttaaagggccaagtgagtatcagctttttcagagtaggcagcttctccctctgaggtcttcctggagaaatggggttgatgtccatgggccacattttctatatatcctctcaataacttaaagggtgagtctggcttctgaatccagatgtctatcacaaatcctcatgggagagtggctgtgtggggttttcctctgtgacttcgctttgtgctgtctgcacacaagcgtcttctgtctcctcaaagccatccggacacacgcacacaaagctccctggaacattgtagcagttttcgtttcttctcttacaggctttttcttctagtgagcattcatctatgtctgcacactgtccactctgct

SEQ ID NO: 1150 - DNA, 504 bp, rat
tttttttttttttttttacgggagcacaacagtttattatttcttgcctgaaaatggtgcaaggtcagaacactcagagcgagcggcccttgtgccttcagagaggacagacccttcaaccagggctttccctgagatatggcctctgctttccaagactctgagggcggctcatacatgcagccaccccagagggagagcactggggcctggacagctgctgttcttctgtctgtctagctatggtccaccggcctgaggcatggccagcacacttctggcctgccctccacttcagtcaagtgtcaaagcaaaagcatctgcaaaggtaacagaccgtccttagagtctggtggttgggagaagccaccactgggcttgacaaggtggagtctgggccatctgtgggaaagttaggacactaagggtaacaagcacgattctggagtggacagcacgtgtgatctggagtttagttacttcagcctcaagtctctcccacag

SEQ ID NO: 1151 - DNA, 421 bp, rat
tttttttttttttttttaaaatgtcgctttttttctttgagatagtagtcctaacagtaccacatagtataaaaaatattttcaaaaaaaaggggggggagttaaaaagaaaagggaaacaaatggtttctatataaactttctgatcactgccaagatcattattgaaggatataagctagttctgaggtattttatactatgggttggggactggagacaggaaaacgactcgtgggtgttagtaacggctcatctttttctagtgaccgtctcacaagaatcgattggcattgacgacagttgcacattaatcatgagacatccaagaggaagattacacggcaggaaagaacccgttagtaacaacgtgctgacagggactcagagcccaaggcgttcaaacctcgtgccgaattct

SEQ ID NO: 1152 - DNA, 585 bp, rat
tttttttttttttttttcaattttgccaattttattgaaccaataaaattcctactaataacaatgaaataaattctgcaggtataaacgtgatacagtttaacaaaacccattgttctgtacctataaatagattttcaaaatgtcatagaaagtgcagttatgaattgttaacatgttaatacacagctcctttatttcaggtgtgtttgtcttgattcattaacagttccttctttatctgttcaaataatattacccatccctcgaaaaacaaaaggacagccgcagaacgaggaacaacgcttctttctggtttgcaggagctgagccaagcggcaaggccaggtttcccaggtgacctaacagggttctcatctcattcaccttgaccagactgtgcgtgtgcccgttcaattcatagaaagatgccgccaggtggcctgggatttgcttccaatgttcatcttgctttgggtaaaaagagtaaatgtgaagaggaaggaaaaatcctacttcctctctcgcagagacatccaaatgcaaaggaaatgtgtgcactagatgtagatcaccatccttggt

SEQ ID NO: 1153 - DNA, 1155 bp, rat
cacgagggttggcagctgcctggcggtcctgaggagcggctagggcagcggagggaaagaaaagggaacggctcggaatttgctccagcggctgctgcaagacctcggcgccaacctcgcaccagcgagcgccccacagcccttcggctgcccctctatgtgctgctgagccggtcctggacccgacgagcccgccttcggtgttccgagccgaaatcgcaaagacggaaggactggaaatggcagaccatatgatggccatgaaccacggtcgcttccccgacggcaccaacgggctgcaccaccaccctgcccaccgcatgggcatggggcagttcccgagcccgcatcaccaccagcagcagcagccccagcacgccttcaacgccctcatgggcgagcacatacactacggcgcgggcaacatgaatgccacgagcggcatcaggcacgccatggggccggggactgtgaacggggggcaccccccgagcgctctggccccggccgccaggtttaacaactcccagttcatgggtccccctgtggccagccagggaggctccctgccggccagcatgcagctgcagaagctcaacaaccagtatttcaaccatcacccctacccccacaaccactacatgccggatttgcaccccgctgcaggccaccagatgaacgggacaaaccagcacttccgagattgcaaccccaagcacagtggaggcagcagcacccctggcggcgcgggtggcagcggcacccccggcggctccggcggcacctcgggcggcgcgggtggcagcagcgcgggcggcagtggcggtggcagcaccatgcccgcctcggtggctcacgtccccgcggcaatgctgccgcccaatgtcatagacactgatttcatcgacgaggaagtgcttatgtccttagtgatagagatgggtttggaccgcatcaaggagctgccagaactctggctgggccaaaatgagtttgattttatgacggacttcgtgtgcaaacagcagcccagcagagtcagctgttgactcggttaacctcgcggctgaaagaaatcaccctccctgcccccacccccaacttcttcggtgtgaattaaaaaaaatcaaaaacaaacaaaaaaaaaacaaaaaa

SEQ ID NO: 1154 - DNA, 503 bp, rat
ggaagaggaggaacaggttgtttatttcggtgactgcgcctctgtcacccatcacaagaccaaccgagagtaaatctaagcagtaaaacagcctccagaaaagaacctcattcacattttcaatcattagtacagacagagccatttaattcccttaacaaaaacaatcattccacgatgtcataacagtaagtacttcagtactatgacactgcaaaaggagtgcttctgacaatagtgcccgaggcttctgagcatgaatctcatcagctgggaagtattttcctaactgagctaagaggaataaaaatcctgaaatttcaaaggtcagggtatttaaaaaccaaggggagtgtgaagaatagttctgctttctacttttattctcaaatacaaagactcctttgggtgtcaacataactccttgatgtattttttgtctctaagttcctaatattaaagttgtaaatattagccccagctgctgacatctgatcaggact

SEQ ID NO: 1155 - DNA, 461 bp, rat
aatttgccactggtgagtttattacatgattattaagttcaaataaaaaaataaaaactaaactttggccgggaggctggagccagaatctgagagttcccggccctaactctggccgagccgtctctactaactgagcttgactctgcccagttcttcaatactcgtgtctgtagtctggacatctcttctggcctcgctggagttctgcgctccgggcactggggctttggtgagagcgccatagacacccatggcctgagccaccatacttgtcacatcgctgggattggagggcaggaggacggtgttggaatccttggccagtttggaaaaggcgctgacgtactgctcagccacagtcagtgaagctgctgcgtctccattgtgttgagtcagagccccagccagaattcgaatggcttcagctttagccttggccttggccagaactgcactgg

SEQ ID NO: 1156 - DNA, 397 bp, rat
agaaagaagttcaccaggaaactagttcccttccaccacgccggacaggctgtagccatccttaaataccgcgcgctgtttcccccttacaccccaaacagggactccttaggatgccttggagggtgaagtctctccctgtgtggcgggatggtatggtggtcgtgaaggcccctctgccacaacggaggtttctgattgtgggacacagtctgggttgttttcttcctgtcttctaatgaaaaaagacattcctgatgacaggcacagtgcaggagtgtgagcttgagctatcgaaacaacctggtgaagtctcgcaaggcccagcaaacttgcttacattcctcagcactagtgacttgcttgtggaaatctgtaagttgtttatgtgtcactg

SEQ ID NO: 1157 - DNA, 2117 bp, rat
ttctccgggggtcccccggagctggaacccttcttcttcttcattatttggtcggtcgggcgtccacgggcgtggacatgccggagatcagcctccgccacgtcgtgtcctgcagcagccaggactcgacccatcgtgccgaaaatcttctcaaggctgacacttaccggaagtggcggtcagccaaggcaggagagaagaccatctctgtggtcctacagttggagaaggaggaacagatacacagtgtggacattggaaacgatggctcggccttcgtggaggtgctagtgggcagctcggctggaggggccacagctggtgaacaggactatgaggtccttctggtcacctcctctttcatgtccccatctgagagccgaagtggctcgaatcccaaccgtgttcgcatttttggacctgacaagttagtccgggcagcagcagagaagcgctgggaccgagttaaaatcgtgtgcagccagccatacagcaaggactcaccctacggcctgagttttgtgaagtttcacagccctccagacaaagacgaggcggaggctccatctcagaaggtgacagtgaccaagctcggccagttccgtgtgaaagaggaggatgacagtgccaactccctgaggccaggggcgctcttcttcaatcggatcaacaaggcggcttcagcctctgcaagtgacccggcaggacccagctatgcagcggctacgctgcaggcctctagtgcggcctcctcagccttgccagtccccaaggttgggggcagctcttccaagcttcaggagcctcccaaagggaagaggaaactggacttgggtctagaagacagcaagcctccgagcaaaccctcagcagggcccgctgccctcaagagacccaagttgcctgttcctagccgtaccccagctgcaactccagcctctaccccagcacagaaagccgtcccagggaagccccggggagaaggcacagagcctaggggagctcgcgctggaccccaggagcttggcaagatcctgcagggggtggtggtggtgctcagtggcttccagaaccccttccgttcagagctccgggacaaggccctggagctgggggccaagtatcggccagactggaccccggacagcacacacctcatctgtgcctttgctaacactcccaagtacagccaggtcctgggcctcggaggccgtattgttcgtaaagagtgggtgctggactgttaccgcatgcggcgccggctgccctcccggaggtacctcatggcaggccttggatccagcagtgaggacgagggggactctcacagtgagagcggtgaagatgaagctcccaagcttccccggaagaggccccagcccaaagccaagacccaggcagcaggacccagctcacccccgaggccaccaaccccagaagagaccaaagcaccatcaccaggaccccaggacaatagtgacactgatggggaacagtcagaaggacgggacaatggggcggaagattctggggacaccgaagatgaactgaggagggtggccaagcagagggagcaaaggcagcccccagccccagaggagaatggcgaggacccgtatgcaggctccacagatgagaacacagacagcgaggctccctcagaggctgacctgccaattccagagctcccagacttcttccagggcaagcacttcttcctgtacggcgagttccctggggatgagaggaggaagctcatccgatatgtgacagctttcaatggtgagctcgaggactacatgagcgaccgggtccagtttgtcatcacggcccaggagtgggatcccaactttgaggaggccctgatggaaaatccttccctggccttcgtccggccccgctggatctacagttgtaatgagaagcagaagttactcccccaccagctctatggggtggtgccccaggcctgaatgtacacctgtgtatgcgcatgcatacacttatgcacatgtatgcacaggcctgggtgcacacgtgtgcacacagatgagtttaataaaggagactttgtttgaagcagaaaaaaaaaaaaaaaaaaaaaaaaaaaaaaaaaa

SEQ ID NO: 1158 - DNA, 239 bp, rat
aagctaaaattgcacctcactaataggaataagcttgcggccgctagagattttttttttttttttttttttttgaataaataagcattaagtttattgaatcatgaataatttaagactggtacaatcgtcagatttattctctatgacatggggcagatctccagcagattgttctcaaacccaaaaacctgatgacacatgagaattaaatagggagagggaggggtggggggcag

SEQ ID NO: 1159 - DNA, 483 bp, rat
tttttttttttttttttacaaaaaaatcctcaaaattctttattctgacaagatgaggaagttggcatcagtgagtcgtgtgccttccatgagcatcacagcccacaggcacgctgcagaaaaagcagcgattccaacagtccccggcaacggctcccagtgtccaggtgcctgctgcaggttaggcggcctgctgttcccagcgtccggtggagcctgggctactggtcctccagcgccgagctcttggcttccacatactccaaggccttcgccttgacagcctgcacgtccttttcggtgccatgctgcttctcgtagtccaggtagcgcttgaagaagaacttcatcctcttgggggccaggctcagatgaatgacccgctcaaagatgtccctgacttctttctggctgccgtgcttgatggtcatgtcgatgtagactgaccagacatctgtgcgttttgggtaggtggtcagtgtg

SEQ ID NO: 1160 - DNA, 584 bp, rat
tttttttttttttttttcagcacataaaaattgacaaagtttattaggaaacattagtggtagatggtttttaaaaagaacataaaagatgacaatccacaagacatatacaaagatattaaatactatctaaattaagaccataattcaaactgctaatcataatcactgtgtcttggtaaagcagctgttgctctgtggaattcatccatcttcccatgaaagccaatgagactcacttcaagctcaatcatttaattactgcagtagacgccgaggacacggcactaagcatgcactgtatcacagagcacagagtgccatctggacggcttctcttcaggtgtatcacggccatcttttaaagtgcaagttacaaatgagctgtctccttaaacaaaggactgtaaagatgtatctgagatagctacccaaccctgccagcatggttacatggttatacaactaacccaaggaaactggcagtcctctgctaatgctcagtccagctctcactgcactaccaaccgaacatgtactccattgctctggacacaagactttcatctttttttgcctcgtgc

SEQ ID NO: 1161 - DNA, 379 bp, rat
attttttttttttttttaaaagtctaagttctgtttatttagtggacaggacactgatcatgtcagaaatctttctcttcatcagatgtttgagccccgtgcaaaacctttggtttttgaggttgaacatggatttctactccatcaataatatgatgttcttcttgtagtgcattctgaagttcttcctgtgaagaaaactgaacccaacccatgcctctgtgaaagccagtctctttgtcaaaaggtacagtgcaccttcttacatggccaaactgagcaaaatgttctcttagctcactcgatgccgcggtccaaggaatttttctaataaacgctataggccgaccagtacgggaacgcaacgcagttagtcctt

SEQ ID NO: 1162 - DNA, 441 bp, rat
cggccgctttccagcactcacactaacgtacctccaagaggcattcggatctccgggggttacgctccgatcccggacgagcccccaatgaaagacccccagattttggggagactctcgctccagtcacgggttgaagtacccccaggaaacacgagaagccggtcttgatgtaatcaacaagaggcagttttatttacgagatctcgggctgacacgtatctcacacaggagattgagtcaagccccgagcctctctaggcaggagcttatatagggaaaaccaggggtttcgtgtgaatacacataattggctaatacaaagggtgcacagttacttttggcacggagttacatcaacaaagcatacgtgtaatctagcatctcagcaatgtgggcagggcaactcatctcactgcagcaaggggatgacccatcctc

SEQ ID NO: 1163 - DNA, 382 bp, rat
  misc_feature (54)..(54): n is a, c, g, or t
cggccgcaaaggttgcatctacttggacgcctgcattgatgttgttcagtgtcncaaaatgcgccgtcatgcttttgaactcaagatgttagataagtatagccattatctggcagctgagactgaacaggaaatggaagaatggttgataacattgaaaaagattattcagatcaatactgacagtttagtgcaagagaaaaaggaaacagtcgaggcaatacaagaggaggaaactagcagccaaggaaaagccgagaacatcatggccagtttggaaaggagcatgcatccggaactgatgaagtatggcagagaaacagaacagctgaacaaactcagtagaggggatggaagacagaatctcttctctttcgactcg

SEQ ID NO: 1164 - protein, 274 aa, rat
MGTDSRAAGALLARASTLHLQTGNLLNWGRLRKKCPSTHSEELRDCIQKTLNEWSSQISPDLVREFPDVLECTMSHAVEKINPDEREEMKVSAKLFIVGSNSSSSTRNAVDMACSVLGVAQLDSVIMASPPIEDGVNLSLEHLQPYWEELENLVQSKKIVAIGTSDLDKTQLEQLYQWAQVKPNSNQVNLASCCVMPPDLTAFAKQFDIQLLTHNDPKELLSEASFQEALQESIPDIEAQEWVPLWLLRYSVIVKSRGIIKSKGYILQAKRKGS

SEQ ID NO: 1165 - protein, 125 aa, rat
MPEPAKSRPAPKKGSKKAVTKAQKKDGKERKRSRKESYSVYVYKVLKQVHPDTGISSKAMGIMNSFVNDIFERIAGERRLAHYNKRSTITSREIQTAVRLLLPGELAKHAVSEGTKAVTKYTSSK

SEQ ID NO: 1166 - protein, 1935 aa, rat; identical to SEQ ID NO: 311

SEQ ID NO: 1167 - protein, 152 aa, rat
MANSERTFIAIKPDGVQRGLVGEIIKRFEQKGFRLVGLKFIQASEDLLKEHYIDLKDRPFFSGLVKYMHSGPVVAMVWEGLNVVKTGRVMLGETNPADSKPGTIRGDFCIQVGRNIIHGSDSVESAEKEISLWFQPEELVDYKSCAQNWIYE

SEQ ID NO: 1168 - protein, 206 aa, rat
MTERRVPFSLLRSPSWEPFRDWYPAHSRLFDQAFGVPRFPDEWSQWFSSAGWPGYVRPLPAATAEGPAAVTLARPAFSRALNRQLSSGVSEIRQTADRWRVSLDVNHFAPEELTVKTKEGVVEITGKHEERQDEHGYISRCFTRKYTLPPGVDPTLVSSSLSPEGTLTVEAPLPKAVTQSAEITIPVTFEARAQIGGPESEQSGAK

SEQ ID NO: 1169 - protein, 465 aa, rat
MPKKVKPTGDENEEESVPCKQVKEELPNTLSVLNFDSPSSFFESLISPIKVETFFKEFWEQKPLLIQRDDPSLAAYYQSLFSLSDLRSLCSQGLYYGRDVNVCRCIGGKKKVLNKDGKAQFLQLRKDFDQKRATIQFHQPQRFKDELWRIQEKLECYFGSLVGSNVYMTPAGSQGLPPHYDDVEVFILQLEGRKRWRLYSPTVPLAREYSVEPEDRIGTPTHDFLLKPGDLLYFPRGTIHQAETPSGLAHSIHLTISTYQNNSWGDYLLDSISGLVFDIAKEDVALRTGMPRRMLMNVETPADVTRKLSGFLRTLADQLEGRKELLSSDMKKDFVMHRLPPFCVGNGTESMNPGGKLPRLNSIVRLQFKDHIVLTVGPDQNQSDEAQQKVVYIYHSLKNERQTHMMGKEVETEIYGLRFPLSYVDALKQIWCGSPVRVKDLKLGTDEEKENLAVSLWTECLVHVL

SEQ ID NO: 1170 - protein, 572 aa, rat
MESLCGVLVFLLLAAGLPLQAAKRFRDVLGHEQYPDHMRENNQLRGWSSDENEWDEQLYPVWRRGEGRWKDSWEGGRVQAALTSDSPALVGSNITFVVNLVFPRCQKEDANGNIVYERNCRSDLELASDPYVYNWTTGADDEDWEDNTSQGQHLRFPDGKPFPRPHGRKKWNFVYVFHTLGQYFQKLGQCSARVSINTVNLTVGPQVMEVIVFRRHGRAYIPISKVKDVYVITDQIPIFVTMYQKNDRNSSDETFLRDLPIFFDVLIHDPSHFLNYSAISYKWNFGDNTGLFVSNNHTLNHTYVLNGTFNFNLTVQTAVPGPCPSPTPSPSSSTSPSPASSPSPTLSTPSPSLMPTGYKSMELSDISNENCRINRYGYFRATITIVDGILEVNIIQVADVPIPTLQPDNSLMDFIVTCKGATPTEACTIISDPTCQIAQNRVCSPVAVDELCLLSVRRAFNGSGTYCVNFTLGDDASLALTSALISIPGKDLGSPLRTVNGVLISIGCLAMFVTMVTILLYKKHKTYKPIGNCTRNVVKGKGLSVFLSHAKAPFSRGDREKDPLLQDKPWML

SEQ ID NO: 1171 - protein, 654 aa, rat
MKFTVVAAALLLLCAVRAEEEDKKEDVGTVVGIDLGTTYSCVGVFKNGRVEIIANDQGNRITPSYVAFTPEGERLIGDAAKNQLTSNPENTVFDAKRLIGRTWNDPSVQQDIKFLPFKVVEKKTKPYIQVDIGGGQTKTFAPEEISAMVLTKMKETAEAYLGKKVTHAVVTVPAYFNDAQRQATKDAGTIAGLNVMRIINEPTAAAIAYGLDKREGEKNILVFDLGGGTFDVSLLTIDNGVFEVVATNGDTHLGGEDFDQRVMEHFIKLYKKKTGKDVRKDNRAVQKLRREVEKAKRALSSQHQARIEIESFFEGEDFSETLTRAKFEELNMDLFRSTMKPVQKVLEDSDLKKSDIDEIVLVGGSTRIPKIQQLVKEFFNGKEPSRGINPDEAVAYGAAVQAGVLSGDQDTGDLVLLDVCPLTLGIETVGGVMTKLIPRNTVVPTKKSQIFSTASDNQPTVTIKVYEGERPLTKDNHLLGTFDLTGIPPAPRGVPQIEVTFEIDVNGILRVTAEDKGTGNKNKITITNDQNRLTPEEIERMVNDAEKFAEEDKKLKERIDTRNELESYAYSLKNQIGDKEKLGGKLSPEDKETMEKAVEEKIEWLESHQDADIEDFKAKKKELEEIVQPIISKLYGSGGPPPTGEEDTSEKDEL

SEQ ID NO: 1172 - protein, 426 aa, rat
MLFHSLSGPEVHGVIDEMDRRQERGSGISSAIDRGDTETTMPSISSDRAALCAGCGGKISDRYYLLAVDKQWHMRCLKCCECKLNLESELTCFSKDGSIYCKEDYYRRFSVQRCARCHLGISESEMVMRARDLVYHLNCFTCTTCNKMLTTGDHFGMKDSLVYCRLHFEALLQGEYPPHFNHADVARAAAAAEQLRVQDWAQLGLTLGLPYYNGVGTVQKGRPRKRKSPGPGADLAAYNAALSCNENDAEHLDRDQPYPSSQKTKRMRTSFKHHQLRTMKSYFAINHNPDAKDLKQLAQKTGLTKRVLQVWFQNARAKFRRNLLRQENTGVDKTSDATLQTGTPSGPASELSNASLSPSSTPTTLTDLTSPTLPTVTSVLTSVPGNLEATSPTALHKRLLPTFSNDSPPPSPLSPHDFFKKEIIFS

SEQ ID NO: 1173 - protein, 244 aa, rat
MSAAAYMDFVAAQCLVSISNRAAVPEHGGAPDAERLRLPEREVTKEHGDPGDTWKDYCTLVTIAKSLLDLNKYRPIQTPSVCSDSLESPDEDIGSDSDVTTESGSSPSHSPEERQDSGSAPSPLSLLHSGVASKGKHASEKRHKCPYSGCGKVYGKSSHLKAHYRVHTGERPFPCTWPDCLKKFSRSDELTRHYRTHTGEKQFRCPLCEKRFMRSDHLTKHARRHTDFHPSMIKRSKKALASPL

SEQ ID NO: 1174 - protein, 168 aa, rat
ETPPRFAQHGTFEYEYSQRWKSLDEMEKQQREQVEKNMKDAKDKLESEMEDAYHEHQANLLRQDLMRRQEELRRMEELHSQEMQKRKEMQLRQEEERRTREEEMMIRQREMEEQMRRQREESYSRMGYMDPKRKRHENGWWWNNEHGRSLWFRRPEISTARWWWWHRL

SEQ ID NO: 1175 - protein, 129 aa, rat
MFILGSVGCVEADEASPLYCLSAALIRLSNDEMGGNVMWFIALLFALLIARCTCHTKNTHPDFSKPTFCHQHAALTNSLSSLYRCFVPDGTAMLPTATKKTPQRRKNGAIIHRVVIYHGRESANGISKQ

SEQ ID NO: 1176 - protein, 394 aa, rat
MVMFKKIKSFEVVFNDPEKVYGSGEKVAGRVTVEVCEVTRVKAVRILACGVAKVLWMQGSQQCKQTLDYLRYEDTLLLEDQPTGENEMVIMRPGNKYEYKFGFELPQGPLGTSFKGKYGCVDYWVKAFLDRPSQPTQEAKKNFEVMDLVDVNTPDLMAPVSAKKEKKVSCMFIPDGRVSVSARIDRKGFCEGDDISIHADFENTCSRIVVPKAAIVARHTYLANGQTKVLTQKLSSVRGNHIISGTCASWRGKSLRVQKIRPSILGCNILRVEYSLLIYVSVPGSKKVILDLPLVIGSRSGLSSRTSSMASRTSSEMSWIDLNIPDTPEAPPCYMDVIPEDHRLESPTTPLLDDVDDSQDSPIFMYAPEFQFMPPPTYTEVDPCVLNNNNNNVQ

SEQ ID NO: 1177 - protein, 269 aa, rat
MADHMMAMNHGRFPDGTNGLHHHPAHRMGMGQFPSPHHHQQQQPQHAFNALMGEHIHYGAGNMNATSGIRHAMGPGTVNGGHPPSALAPAARFNNSQFMGPPVASQGGSLPASMQLQKLNNQYFNHHPYPHNHYMPDLHPAAGHQMNGTNQHFRDCNPKHSGGSSTPGGAGGSGTPGGSGGTSGGAGGSSAGGSGGGSTMPASVAHVPAAMLPPNVIDTDFIDEEVLMSLVIEMGLDRIKELPELWLGQNEFDFMTDFVCKQQPSRVSC

SEQ ID NO: 1178 - protein, 631 aa, rat
MPEISLRHVVSCSSQDSTHRAENLLKADTYRKWRSAKAGEKTISVVLQLEKEEQIHSVDIGNDGSAFVEVLVGSSAGGATAGEQDYEVLLVTSSFMSPSESRSGSNPNRVRIFGPDKLVRAAAEKRWDRVKIVCSQPYSKDSPYGLSFVKFHSPPDKDEAEAPSQKVTVTKLGQFRVKEEDDSANSLRPGALFFNRINKAASASASDPAGPSYAAATLQASSAASSALPVPKVGGSSSKLQEPPKGKRKLDLGLEDSKPPSKPSAGPAALKRPKLPVPSRTPAATPASTPAQKAVPGKPRGEGTEPRGARAGPQELGKILQGVVVVLSGFQNPFRSELRDKALELGAKYRPDWTPDSTHLICAFANTPKYSQVLGLGGRIVRKEWVLDCYRMRRRLPSRRYLMAGLGSSSEDEGDSHSESGEDEAPKLPRKRPQPKAKTQAAGPSSPPRPPTPEETKAPSPGPQDNSDTDGEQSEGRDNGAEDSGDTEDELRRVAKQREQRQPPAPEENGEDPYAGSTDENTDSEAPSEADLPIPELPDFFQGKHFFLYGEFPGDERRKLIRYVTAFNGELEDYMSDRVQFVITAQEWDPNFEEALMENPSLAFVRPRWIYSCNEKQKLLPHQLYGVVPQA

SEQ ID NO: 1179 - DNA, 1610 bp, human
ggcacgaggctgcggccgcagtagccggagccggagccgcagccaccggtgccttcctttcccgccgccgcccagccgccgtccggcctccctcgggcccgagcgcagaccaggctccagccgcgcggcgccggcagcctcgcgctccctctcgggtctctctcgggcctcgggcaccgcgtcctgtgggcggccgcctgcctgcccgcccgcccgcagccccttgcctgccggcccctgggcggcccgtgccatgggcaccgacagccgcgcggccaaggcgctcctggcgcgggcccgcaccctgcacctgcagacggggaacctgctgaactggggccgcctgcggaagaagtgcccgtccacgcacagcgaggagcttcatgattgtatccaaaaaaccttgaatgaatggagttcccaaatcaacccagatttggtcagggagtttccagatgtcttggaatgcactgtatctcatgcagtagaaaagataaatcctgatgaaagagaagaaatgaaagtttctgcaaaactgttcattgtagaatcaaactcttcatcatcaactagaagtgcagttgacatggcctgttcagtccttggagttgcacagctggattctgtgatcattgcttcacctcctattgaagatggagttaatctttccttggagcatttacagccttactgggaggaattagaaaacttagttcagagcaaaaagattgttgccataggtacctctgatctagacaaaacacagttggaacagctgtatcagtgggcacaggtaaaaccaaatagtaaccaagttaatcttgcctcctgctgtgtgatgccaccagatttgactgcatttgctaaacaatttgacatacagctgttgactcacaatgatccaaaagaactgctttctgaagcaagtttccaagaagctcttcaggaaagcattcctgacattcaagcgcacgagtgggtgccgctgtggctactgcggtattcggtcattgtgaaaagtagaggaattatcaaatcaaaaggctacattttacaagctaaaagaaggggttcttaactgacttaggagcataacttacctgtaatttccttcaatatgagagaaaattgagatgtgtaaaatctagttactgcctgtaaatggtgtcattgaggcagatattctttcgtcatatttgacagtatgttgtctgtcaagttttaaatacttatcttgcctccatatcaatccattctcatgaacctctgtattgctttccttaaactattgttttctaattgaaattgtctataaagaaaatacttgcaatatatttttcctttatttttatgactaatataaatcaagaaaatttgttgttagatatattttggcctaggtatcagggtaatgtatatacatattttttatttccaaaaaaaattcattaattgcttcttaactcttattataaccaagcaatttaattacaattgttaaaactgaaatactggaagaagatatttttcctgtcattgatgagatatatcagagtaactggagtagctgggatttactagtagtgtaaataaaattcactcttcaatac

SEQ ID NO: 1180 - DNA, 2223 bp, human
acttcttttcttggctaagccgcgtttgtactgtgtcttaccatgcctgaaccggcaaaatccgctccggcccctaaaaagggctccaagaaagccgtcaccaaagcccagaagaaagacggcaagaagcgcaagcgcagccgcaaagagagctactccatctacgtgtacaaggtgctgaagcaggtccaccccgacaccggcatctcgtccaaggccatgggcatcatgaactccttcgtcaacgacatcttcgagcgcatcgcgggagaggcttcccgcctggcgcactacaacaagcgctccaccatcacatcccgcgagatccagacggccgtgcgcctgctgctgcccggcgagctggccaagcacgccgtgtccgagggcaccaaggcggtcaccaagtacaccagctccaagtgagtccctgccgggacctggcgctcgctcgctcgagtcgccggctgcttgactccaaaggctcttttcagagccacccacctaatcactagaaaagagcttgttcacttattcccttagtttcttttcataaagtaagttattttagtgtgaaggtcatgggaaatggcatacgtagctttttaactatttggaactcgaggtccccagtgcgtcattggatttgcttttgaatctagagcgtgtctttactcattgtgctgcttagccttcccaggagtcggttctcaattaggctgttgggaatccgcctctttacccgcccccactcccgccccacacgcgccctggtggctccttgggtctgtttcattctaaaacgaagtggctgagttcggctgtcatttaagagaactccaggacacaattcagcccgggttccgcaaacactgcgtgacagctctgtatgactgacgcttggcagcagcttttgtgtccggtcaccagttctgccgtgcgatggggcctcctgtggataccagccgttctgtgtattttggacgaaggccgcgcagccgggtcccagccttgtcctgattgggcgacaagaatattcaaaattctgcgcctttttctaatttgtagatttcagtttccgtcgttcactttgagactttgaaattcctatttctcattttgttgataatttctgcatttaatggtctgtgctttaaatggtaacgctacggccccaggtcactgcgaggcacttaccatgtagatacgggctcaaaagtcacctctcagagacctacgtcatccactcaggaattcgcgcctctcatacttgcctgtctcattttatcttccttctagcagctgtctgaaattggttcgtctgttttcttgtttatggtattctcaagcccttgacagaccggctagtgtggttttcccgtgcatcttcagcctggcacattatggacacttaaatactacgtattgatctaatattgttgggttaatttttccatcccacccttttcttaatcgcttccgtggatggatgaagggtgctgttcatttccattagatgtatgtgaaggcacagtgaaaatggaaatgttcttggagctacttcctcaaaatgtatccttagtcacctcagtgcaacagctgggagggggccgtgttaagattttttttgctacaaagaggaggtggcaatggtagatccacccttatgcttctcagtttagcataacctcttatggattttcatcaaattcagcgtgttggtcactggaaagagccttttccttctccttttcttactctcccctcatggtgttcccctcttaaaggagaggagcttttaatttacacttaccacctcatttgcttttctggaggccatgcaatataggcgggactacagagttaatctcctttttacaaatgaggccaagagaagcctcattggttcacagtcatgcagctcatactgtccacccttgtattctcagatgcaggacaattgcattttagttttattttgtggaggtgcagaatatttactctttctgtccaacccttgattctgccgaggaagacactgatggtttgatgagtgattcagctgtttttggctaagggcttttggagctgatggcaggggtttgatgaatccaaatgagctctagacattatcacagactgaatagatcttaactgtctcctacatgtgtgttttcaaatgtgtatagatgctattgttattaataaagttaccaattaatttaa

SEQ ID NO: 1181 - DNA, 1787 bp, human
aaaaaaaaaaaaaagccgtgggtcaggagccagagccctctgctctagtcttagctgtgccaatgtgactccctgtgtgatttgggggtaaattactgcccctcactgggtctctgtctacccacctgcaaaatgagaggatctttggatgagtctccttaattcatttcctggacaaacttcctccaaggctcccccagatttatcagtgacgcccttccctaagtatcaacttagccgtactttgaactctggcccctcaggtttcaaggggacggccttgtctgggatcagctctgtctggggaaagaagctgcaccagcctctggatagcaggctgagtcacttgtttcttgtgccttgagtcagttctctcatcagctctcctcctaggccagtgttattacctccagtaaagatggaaaagttggggttcagagagggctagagacagacagcctgctgtgtcctgtcttttctcctgtgctgtacaggttcaccaatttttaaaatccaaatatatctcatggtacagtggaagaactggccagagagtctggaagtttgggttctggtcctggctgtgccactgactcactgtgaccttgggatcttgtgctgtgaagacatttcccaagtgcttcatgttagccagcaaatctgacccacaaggcctggaaagaggtgattgttaggttgcgcagaggtggtcttatccagctcagcttcccctgggacccaccgtgggacctgaggcagaactggggtggacttggcctcctccatggcacaccggctgcagatacgactgctgacgtgggatgtgaaggacacgctgctcaggctccgccaccccttaggggaggcctatgccaccaaggcccgggcccatgggctggaggtggagccctcagccctggaacaaggcttcaggcaggcatacagggctcagagccacagcttccccaactacggcctgagccacggcctaacctcccgccagtggtggctggatgtggtcctgcagaccttccacctggcgggtgtccaggatgctcaggctgtagcccccatcgctgaacagctttataaagacttcagccacccctgcacctggcaggtgttggatggggctgaggacaccctgagggagtgccgcacacggggtctgagactggcagtgatctccaactttgaccgacggctagagggcatcctggggggccttggcctgcgtgaacacttcgactttgtgctgacctccgaggctgctggctggcccaagccggacccccgcattttccaggaggccttgcggcttgctcatatggaaccagtagtggcagcccatgttggggataattacctctgcgattaccaggggcctcgggctgtgggcatgcacagcttcctggtggttggcccacaggcactggaccccgtggtcagggattctgtacctaaagaacacatcctcccctctctggcccatctcctgcctgcccttgactgcctagagggctcaactccagggctttgaggccagtgagggaagtggctgggccctaggccatggagaaaaccttaaacaaaccctggagacagggagccccttctttctccacagctctggacctttccccctctccctgcggcctttgtcacctactgtgataataaagcagtgagtgctgagctctcacccttcccccactaaccagaaaaaaaaaaaaaaaaaaaaaaaaaaaaaaaaaaaaaaaaaaaaaaaaaaaaaaaaaaaaaaaaaa

SEQ ID NO: 1182 - DNA, 6008 bp, human; identical to SEQ ID NO: 473

SEQ ID NO: 1183 - DNA, 5823 bp, human
ggtagctgggtgcagacgccgtggcgctggagacccaaacatggcaaacctggaagaaagcttcccccgaggaggtacaagaaagatccacaaaccagagaaagctttccagcagtcagttgaacaagacaacttatttgatatttctactgaagagggatccaccaaaagaaaaaagagccagaaggggccagcaaaaacaaaaaagttgaaaatcgaaaagagagaaagcagcaagtccgcaagagagaagtttgaaatccttagtgttgagtccctgtgtgagggaatgcgtattttgggttgcgtgaaagaggtgaatgaactggaactggtgattagtctccccaatggcctccagggctttgtgcaagtcactgaaatctgtgatgcctacaccaaaaagctgaatgagcaggtgacacaagaacaacctctgaaggacctacttcacttgcctgaacttttctcacctggaatgctggtaagatgtgtggtgagcagtctgggcatcacagacaggggcaagaagagtgtcaagctgtctctgaaccccaaaaatgtcaacagagtgctgagtgctgaggccctgaagcctggcatgctacttacaggtaccgtatccagcctggaagaccatggctacctagtggacattggtgttgatgggaccagagcttttctgccactgctgaaagcccaggagtacatcagacagaagaacaaaggtgctaaactaaaggtgggtcagtacctgaactgcattgttgaaaaggtgaaaggcaacggaggagttgttagtctgtctgttggtcactcagaggtttctacggccattgctactgaacagcagagctggaaccttaataacttgctaccaggactggtggtcaaagctcaggtacagaaggtgactccatttggccttacgctaaacttcctcacattcttcacgggcgtggttgactttatgcacctggatcccaagaaagctggaacatatttctcaaatcaggcagtgagggcctgcatcctttgcgtccatcctcgaaccagagttgtgcacctgagcctgcgccccatcttcctacagcctggacgcccactcacccgactctcttgccagaaccttggagcagtgctggatgatgttcctgtccagggttttttcaaaaaggctggggccacctttaggctgaaggatggggttctggcctatgcccggctcagccatctctctgattctaagaacgtcttcaatcctgaggccttcaagccagggaacactcacaagtgtagaattattgactacagccaaatggatgaactggccttgctctctctacgaacgtctattattgaagctcagtaccttagatatcatgacatcgaacctggggcagtggtaaagggcacagtgctaaccataaagtcatatgggatgctggtgaaggtgggcgagcagatgaggggcctggtacctcccatgcacctggctgacatcctgatgaagaatccggagaagaagtaccacatcggggatgaggtcaagtgccgggttttgctttgtgaccctgaagccaagaagctgatgatgaccctgaaaaaaaccctgattgagtccaaactacctgtcattacctgctatgccgatgccaagcctggtctgcagacacatggcttcatcatcagggtcaaggactatggctgcattgtgaagttctacaacaatgtgcagggactggtgcccaagcatgagctcagtactgagtatatccctgacccggagagagttttttacactggccaggtggtgaaggttgtcgtattgaactgtgagccatccaaagagaggatgctcttatccttcaagctgtcgagtgatccagagccaaagaaagagcctgcaggacacagtcagaagaaaggaaaagccattaacattgggcagttggtagatgtgaaggttttagagaagaccaaagatgggctggaggtggctgtcctgccccacaacatccgtgctttcctccccacatctcatctgtcggaccacgttgccaacggcccattgttacatcattggctccaggcaggtgacatccttcaccgagtcctgtgtctgagccagagcgaggggcgtgttcttctttgcaggaagccagccttggtctccacagtagaaggtggccaggatcccaagaacttctcagaaatccatcctggaatgctgctcattggttttgtgaagagcatcaaggactatggcgtgttcatccagttcccctcaggtcttagcggactggccccaaaagctatcatgagtgacaaatttgtgacctccacaagtgaccactttgttgagggccagacagtagcggcaaaggtgaccaatgtggatgaggagaagcagcggatgctgctgtcactgcggctgtcggactgtggtctgggggacttggctatcaccagcctcctcctcctgaatcagtgcctggaggagctgcagggcgtgcgcagccttatgagcaaccgagactctgtgttgatccagacgctggccgagatgaccccaggaatgttccttgacctagtggtgcaggaggtgttggaagatggctctgtggtattcagtgggggtccagtgcccgacctggtcctgaaagccagcagataccatcgcgcagggcaggaggtggaatctgggcagaaaaagaaggttgttatcttaaatgttgatcttttgaagttggaagtgcacgtttcccttcaccaggacttggtgaatagaaaagctagaaagctgaggaaaggcagcgaacaccaggcgattgtgcagcacttggagaagtcctttgccattgcctccttggtagagacgggccacctggcagctttctccctgacctctcacctcaacgacaccttccgctttgactcagagaaattgcaggtgggacagggtgtctccctaaccctcaagaccacagaaccaggagtgactggccttcttttggctgtggaggggccggctgccaagaggaccatgaggccgacccagaaggactctgagacagttgatgaggatgaagaagtggatccagctctgactgtagggaccataaagaagcacaccctctccatcggggacatggtcacagggactgtcaagtccattaagcctacccatgtggttgtgactctggaagatggcattattggctgtatccatgcctcccacattctagatgatgttccagagggcacctctcctactaccaagctgaaggttgggaagacggtcactgcccgagtgattggcgggcgagacatgaagacattcaagtatctcccaataagtcaccccagattcgttcgaaccatcccggagctgagtgttcggccaagtgagctggaggatggccacactgctcttaacactcactctgttagccccatggagaagattaaacagtaccaggccggccagactgttacttgcttcttaaagaaatacaatgtggtgaagaaatggcttgaggtggagattgccccagacatccgggggagaattcccttattgctcacttctctgagcttcaaggttctgaagcatccagataagaagttccgggttggccaggccctgagggccaccgttgttggcccagattcctccaagaccttcttatgtctgtccctcacaggtcctcacaagcttgaggaaggggaagtggccatgggccgagtggtgaaggtgactcccaacgaggggctgaccgtctccttcccctttgggaagataggaacagtcagtatatttcacatgagtgactcctactccgagacgcccctggaagacttcgtcccccagaaggttgtcagatgttacatcctgtccactgcagacaacgtattgactttgtcgctgcgatcatccagaacaaacccggagacgaaaagcaaagtagaagatccagagattaactccatccaggacattaaggaagggcagcttctgaggggctatgtagggtccatccagccacacggtgtgttctttcgccttggcccctccgttgtgggtttggctcggtactcccatgtctcccagcacagcccgtccaagaaagccctttataacaaacacctccctgaagggaagctgctcacagccagggtcctacgccttaaccaccagaagaacctggtagagctgtctttcctccccggagacactgggaagccagacgtgctttctgcttccttggaagggcaacttacaaagcaagaggagaggaaaacagaggctgaggagagagaccaaaaaggggaaaagaaaaatcagaaaaggaacgagaagaagaaccagaaggggcaggaggaggtggagatgcccagcaaggagaagcaacagccccagaagccacaggcgcagaagcggggcgggcgggagtgccgggagtctgggagtgagcaggaaagagtgagcaagaagccaaagaaagccggcctgtcagaggaggacgacagccttgtggacgtgtactatcgggagggaaaagaggaggcagaagagacgaatgtgctgcccaaggagaagcaaaccaagccagcagaagcgccccggctgcagctgtcttcaggcttcgcttggaatgtgggactagactctctgaccccggccttgccacctctagcagagagctcagacagcgaggaggatgagaagccacaccaagccacgataaagaaaagcaagaaagaaagggagttggagaagcagaaggcagagaaggaactgtcccgcattgaggaggcgctgatggatcctgggcggcagccagagtccgcggatgattttgaccgactggtgctgagctcccccaacagctccattctgtggctgcagtacatggctttccacctgcaggccacggagatcgagaaggcccgtgccgtggctgagagggcccttaagaccatctccttcagagaggagcaggagaagctgaacgtgtgggtggctctgctgaacctggagaacatgtacggctctcaggagtccctgaccaaggtctttgagcgagccgtgcagtacaacgagcctctcaaagtctttctccacctggctgacatctacgccaagtcagagaaattccaggaagctggtgaactctacaaccggatgctgaagcgtttccggcaggagaaagctgtgtggatcaaatacggcgccttccttctgcggaggagccaggctgcagccagtcaccgcgtgctgcagcgagccctggagtgcctgcctagcaaggagcatgtggatgtcattgccaagtttgcccagcttgagtttcagctgggggatgcagagcgggccaaagccatttttgagaacacgctgagcacctacccaaagcgcacagatgtctggtcggtctatatcgacatgaccatcaagcacggcagccagaaggacgtccgggacatctttgagcgggtcattcatctgagcttggcccccaagagaatgaagttcttcttcaagcgctacctggactacgagaagcagcatggcactgagaaggatgtgcaggcagtcaaggccaaggccctggagtatgtggaggccaagagctcagtgctagaggactagtggcaggctggctctgtgggacactgtcaacaatgggccagcccggccccgcctcgagtgcctgggcactcggaaaactgttacctcaggactctatttaaatgctgctttttctgcagcacgcttggggaaatcctgtcaggatgaaaaggaagttgagatttttt

SEQ ID NO: 1184 - DNA, 732 bp, human
tgctgcgaaccacgtgggtcccgggcgcgtttcgggtgctggcggctgcagccggagttcaaacctaagcagctggaaggaaccatggccaactgtgagcgtaccttcattgcgatcaaaccagatggggtccagcggggtcttgtgggagagattatcaagcgttttgagcagaaaggattccgccttgttggtctgaaattcatgcaagcttccgaagatcttctcaaggaacactacgttgacctgaaggaccgtccattctttgccggcctggtgaaatacatgcactcagggccggtagttgccatggtctgggaggggctgaatgtggtgaagacgggccgagtcatgctcggggagaccaaccctgcagactccaagcctgggaccatccgtggagacttctgcatacaagttggcaggaacattatacatggcagtgattctgtggagagtgcagagaaggagatcggcttgtggtttcaccctgaggaactggtagattacacgagctgtgctcagaactggatctatgaatgacaggagggcagaccacattgcttttcacatccatttcccctccttcccatgggcagaggaccaggctgtaggaaatctagttatttacaggaacttcatcataatttggagggaagctcttggagctgtgagttctccctgtacagtgttaccatccccgaccatctgattaaaatgcttcctcccagc

SEQ ID NO: 1185 - DNA, 820 bp, human
cgctgcgcctgttggggctgcacctcggaccagggcttctgctgcatctgcagccatgtcgggccgctcagtgccacatgcccacccggccaccgccgagtacgaatttgccaacccgagccgcctgggtgagcagcgcttcggagaaggcctcctgccagaagagatcctgacccccacactctaccatggctactatgtccggcctcgggccgccccagctggggagggcagcagggcaggggcctccgagcttaggctcagtgagggcaagttccaggcatttctggatgtgagccactttaccccagacgaggtgactgtgaggactgtggataacctgctggaggtgtctgcccggcacccccagcgcctggaccgccacggcttcgtgtcccgagagttctgccgcacctatgtcctgcctgctgatgtcgacccctggcgagtccgagctgctctctcccatgatggcatcttaaacctggaagcacctcggggtggccgacatttggacacagaggtcaatgaggtctacatctccctgctccctgcgcctcctgatccagaggaagaggaggaggcagccatagttgagccctgattgccacagacccagcacccagcaaatccctctctacctcccaaggtgatatgggcagctgcccaccactccagaggtagcagcatccttgggggaagggaaaggtgcatggtccacaatgtatggtttggtcccatgggacatgtcatagccttggtttagttttgggtggagctgaataaacccaaatttcagggcaaaaaaaaaaaaaaaaaa

SEQ ID NO: 1186 - DNA, 372 bp, human
acagagtttcatggacttcgcttccctttgtcacatttggatgcactgaagcaaatttggaatagtccagctatttctgtcaaggacctgaaacttactacagatgaggaaaaggaaagcctggtattatccctctggacagaatgtttaattcaagtagtctagtgcctttgcagaatcaaatgcctactattttatatgcatatattaaaagaaaagcaaagacctgagccgaggagaggatgaattcaagtttccttacctgcgtatctactaacaaacatgagacctccctgttacaggtggtcagttggccaaatgtactaacgggcacatgaaagaaagaacagcaaattaccaagtgtctcagaa

SEQ ID NO: 1187 - DNA, 472 bp, human
ggctacggctgaccgttttttgtggtgtactccgtgccatcatgtccgtcctgacgccgctgctgctgcggggcttgacaggctcggcccggcggctcccagtgccgcgcgccaagatccattcgttgccgccggaggggaagcttgggatcatggaattggccgttgggcttacctcctgcttcgtgaccttcctcctgccagcgggctggatcctgtcacacctggagacctacaggaggccagagtgaaggggtccgttctgtccctcacactgtgacctgaccagccccaccggcccatcctggtcatgttactgcatttgtggccggcctcccctggatcatgtcattcaattccagtcacctcttctgcaatcatgacctcttgatgtctccatggtgacctccttgggggtcactgaccctgcttggtggggtcccccttgtaacaataaatctatttaaacttt

SEQ ID NO: 1188 - DNA, 2669 bp, human
cagatgccagaagaacactgttgctcttggtggacgggcccagaggaattcagagttaaaccttgagtgcctgcgtccgtgagaattcagcatggaatgtctctactatttcctgggatttctgctcctggctgcaagattgccacttgatgccgccaaacgatttcatgatgtgctgggcaatgaaagaccttctgcttacatgagggagcacaatcaattaaatggctggtcttctgatgaaaatgactggaatgaaaaactctacccagtgtggaagcggggagacatgaggtggaaaaactcctggaagggaggccgtgtgcaggcggtcctgaccagtgactcaccagccctcgtgggctcaaatataacatttgcggtgaacctgatattccctagatgccaaaaggaagatgccaatggcaacatagtctatgagaagaactgcagaaatgaggctggtttatctgctgatccatatgtttacaactggacagcatggtcagaggacagtgacggggaaaatggcaccggccaaagccatcataacgtcttccctgatgggaaaccttttcctcaccaccccggatggagaagatggaatttcatctacgtcttccacacacttggtcagtatttccagaaattgggacgatgttcagtgagagtttctgtgaacacagccaatgtgacacttgggcctcaactcatggaagtgactgtctacagaagacatggacgggcatatgttcccatcgcacaagtgaaagatgtgtacgtggtaacagatcagattcctgtgtttgtgactatgttccagaagaacgatcgaaattcatccgacgaaaccttcctcaaagatctccccattatgtttgatgtcctgattcatgatcctagccacttcctcaattattctaccattaactacaagtggagcttcggggataatactggcctgtttgtttccaccaatcatactgtgaatcacacgtatgtgctcaatggaaccttcagccttaacctcactgtgaaagctgcagcaccaggaccttgtccgccaccgccaccaccacccagaccttcaaaacccaccccttctttaggacctgctggtgacaaccccctggagctgagtaggattcctgatgaaaactgccagattaacagatatggccactttcaagccaccatcacaattgtagagggaatcttagaggttaacatcatccagatgacagacgtcctgatgccggtgccatggcctgaaagctccctaatagactttgtcgtgacctgccaagggagcattcccacggaggtctgtaccatcatttctgaccccacctgcgagatcacccagaacacagtctgcagccctgtggatgtggatgagatgtgtctgctgactgtgagacgaaccttcaatgggtctgggacgtactgtgtgaacctcaccctgggggatgacacaagcctggctctcacgagcaccctgatttctgttcctgacagagacccagcctcgcctttaaggatggcaaacagtgccctgatctccgttggctgcttggccatatttgtcactgtgatctccctcttggtgtacaaaaaacacaaggaatacaacccaatagaaaatagtcctgggaatgtggtcagaagcaaaggcctgagtgtctttctcaaccgtgcaaaagccgtgttcttcccgggaaaccaggaaaaggatccgctactcaaaaaccaagaatttaaaggagtttcttaaatttcgaccttgtttctgaagctcacttttcagtgccattgatgtgagatgtgctggagtggctattaacctttttttcctaaagattattgttaaatagatattgtggtttggggaagttgaattttttataggttaaatgtcattttagagatggggagagggattatactgcaggcagcttcagccatgttgtgaaactgataaaagcaacttagcaaggcttcttttcattattttttatgtttcacttataaagtcttaggtaactagtaggatagaaacactgtgtcccgagagtaaggagagaagctactattgattagagcctaacccaggttaactgcaagaagaggcgggatactttcagctttccatgtaactgtatgcataaagccaatgtagtccagtttctaagatcatgttccaagctaactgaatcccacttcaatacacactcatgaactcctgatggaacaataacaggcccaagcctgtggtatgatgtgcacacttgctagactcagaaaaaatactactctcataaatgggtgggagtattttggtgacaacctactttgcttggctgagtgaaggaatgatattcatatattcatttattccatggacatttagttagtgctttttatataccaggcatgatgctgagtgacactcttgtgtatatttccaaatttttgtatagtcgctgcacatatttgaaatcatatattaagactttccaaagatgaggtccctggtttttcatggcaacttgatcagtaaggatttcacctctgtttgtaactaaaaccatctactatatgttagacatgacattctttttctctccttcctgaaaaataaagtgtgggaagagacaaaaaaaaaaaaa

SEQ ID NO: 1189 - DNA, 17070 bp, human
atggatcaggctcaggtcagtcctctggctttggacaacatgggtctggctcaggacaatcctctggctttggacaacatgagtctagatcaggtcagtctagctatggccaacacagttctggctcaagtcagtcatctggctatggccaacatgggtctagacagacatctggctttggacaacatgggtcaggctcaagtcaatccactggctttggccaatatggatcaggctcaggtcagtccgctggctttggacaacatgggtctggctcaggacaatcctctggctttggacagcatgagtctagatcacatcagtccagctatggccaacatggttctggctcaagtcaatcatctggctatggtcaacatgggtcaagttcgggacagacatctggctttggacaacacaggtcaagctcaggtcaatactctggctttggacaacatggatcaggctcaggtcagtccagtggctttggacaacatgggactggctcaggacaatactctggttttggacaacatgagtctagatcacatcagtctagctatggccaacatggttctggctcaagtcagtcatctggctatggtcaacatgggtcaagttcaggacagacttttggatttggacaacacaggtcaggctcaggtcaatcctctggctttggccaacatggatcaggctcaggtcagtcctctggctttggacaacatgagtcaggctcaggaaaatcctctggctttggacagcatgagtctagatcaagtcagtctaattatggccaacatggttctggctcaagtcagtcatctggctatggtcaacatgggtctagttcaggacagacaactggctttggacaacacaggtcaagctcaggccaatactcaggctttggacaacatggatcaggctcagatcagtcctctggctttggacaacatgggactggttcaggacaatcctctggttttggacaatatgagtctagatcacgtcagtctagctatggccaacatggttctggctcaagtcaatcatctggctatggtcaacatgggtcaaattcaggacagacatctggatttggacaacacaggccaggctcaggtcagtcctctggctttggccaatatggatcgggctcagcatgagtacagatcaggtcagtctagctatggccaacatggtactggctccagtcaatcatctggctgtggccaacatgagtctggctcaggtccaaccacaagttttggacagcatgtgtctggctcagacaatttctctagttctggacaacatatatctgactcaggtcagtccactggatttggccaatatggttcaggctcaggtcaatcaactggcttgggccagggtgaatctcaacaagtagagtcaggatccacagttcatgggagacaggaaactactcatggtcagacaataaataccactagacatagccagtctggtcaaggacaatccacacagacagggtccagggtaactagaagacgaagatctagccaaagtgagaacagtgacagtgaagtgcactcaaaggtctcacacagacattcagaacacattcacacacaagctggatctcactacccaaagtcaggatccacagttcgcagaagacaaggaactactcatggacagagaggagataccactagacatggccattctggtcatggacagtctacacagacaggttccagaacatctggaagacagagatttagccacagtgatgccactgacagtgaagtgcactcaggggtctcacatagaccacactcacaagaacaaactcacagccaagctggatctcaacatggagagtcagaatccacagttcatgagagacatgaaactacttatggacagacaggagaggccactggacatggccactctggtcatggacagtccacacagagagggtccaggacaactggaagaaggggatctggccatagtgagtccagtgacagtgaagtgcactcagggggctcacacagaccacaatcacaagaacaaactcatggccaagccggatctcaacatggagagtcaggatccacagttcatgggagacacggaactactcatggacagacaggagataccactagacatgcccactatcatcatggaaaatccacacagagagggtccagtacaactggaagaaggggatctggccacagtgagtccagtgacagtgaagtgcactcagggggctcgcacacacattcaggacacactcacggccaaagtggatctcaacatggagagtcagaatccataattcatgacagacacagaattactcatggacagacaggagataccactagacattcctactctggtcatgaacaaaccacacagacagggtccaggacaactggaagacagagaactagccacagtgagtccactgacagtgaagtgcactcagggggctcacacagaccacactcacgagaacacacttacggccaagccggatctcaacatgaagagccagaattcacagttcatgagagacacggaactactcatggacagataggagataccactggacattcccactctggtcatggacagtccacacagagagggtccaggacaactggaagacagagatctagccacagtgagtccagtgacagtgaagtgcactcaggggtctcacacacacatacaggacacactcatggtcaagctggatctcaacatggacagtcagaatccatagttcctgagagacatggaactactcatggacagacaggagataccactagacatgcccactatcatcatggattaaccacacagacagggtccaggactactggaagaaggggatctggccacagtgagtacagtgacagtgaagggtactcaggagtctcacatacacattcaggacacactcatggccaagccagatctcaacatggagagtcagaatccatagttcatgagagacatggaactatacatggacagacaggcgataccaccagacatgcccactctggtcatggacagtccacacagacagggtccaggaccactggaagaaggtcatctggccacagtgagtacagtgacagtgaagggcactcagggttctcacaaagaccacactcacgaggacacactcacggccaggctggatctcaacatggagagtcagaatccatagttgacgagagacatggaactactcatggacagacaggagataccagtggacattctcaatctggtcatggacagtccacacagtcaggatccagtacaactggaagaaggagatctggccacatcatggacaaaccatacagacagggtccaggacaactggaagaaggggatctggccacagtgagtacagtgacagtgaagggccctcaggggtctcacacacacattcaggacacactcacggtcaagctggatctcactatccagagtcaggatcctcagttcatgagagacacggaactactcatggacaaacagcagataccactagacatggccactctggtcatggacagtccacacagagagggtccaggacaactggaagaagggcatctggccacagtgagtacagtgacagtgaagggcactcaggggtctcacacacacattcaggacacgctcatggccaagccggatctcaacatggagagtcaggatcctcagttcatgagagacacggaactactcatggacagacaggagataccactagacatgctcactctggtcatggacagtccacacagagagggtcaaggacagctggaagaaggggatctggccacagtgagtccagtgacagtgaagtgcactcaggggtctcacacacacattcaggacacacttatggccaagccagatctcaacatggagagtcaggatctgccattcacgggagacagggaactatacatggacagacaggagataccactagacatggccagtctggtcatggacagtccacacagacaggttccaggacaactggaagacaaagatctagtcacagtgagtccagtgatagtgaagtgcactcagaggcctcacccacacattcaggacacactcacagccaagccggatctcgacatggacagtcaggatcctcaggtcatgggagacagggaactactcatggacagacaggagataccactagacatgcccactatggttatggacaatccacacagagagggtccaggacaactggaagaaggggatctggccacagtgagtccagtgacagtgaagtgcactcatggggctcacacacacattcaggacacattcagggccaagctggatctcaacaaagacagccaggatccacagttcatgggagactggaaactactcatggacagacaggagataccactagacatggccattctggttatggacaatccacacagacaggttccagatctagtagagcaagtcattttcagtcacatagtagtgaaaggcaaaggcatggatcaagtcaggtttggaaacatggcagctatggacctgcagaatatgactatgggcacactggtatccaaagcaactaaaagaacaggaagacacagtttaaatcatgaacagtcaatggtaagttatgaacattcagttgattctcagtatcagtctcgacctattattataagaagtcaggaatctagtcatggacattctatagtaactcataaacagtcaaacaacacctatgttcaacctggatataacacagccagaagggagggatgtacacatagccagtcaaatgaccaccttggatttggccatggacaatccatatcagttcatggccattcaaaatctagttcaatcagaaaacaggaatcccatactgataacaaaaagcattcagaagattgggagaaagacactcatgagcaattaggatctaggcatgggaagttagagttcaatacaataggtatacatggatctagccagcaacatttcggagatacaacttttcatgggcaggttcacatttattgccaaaagatgtctactctcctggaaaacatctttgccataattaatcttttcaagcaatattcaaaaaaagataaaaacactgacacattgagtaaaaaagagctgaaggaacttctggaaaaggaatttcggcaaatcctgaagaatccagatgacccagatatggttgatgtcttcatggatcacttggatatagaccacaacaagaaaattgacttcactgagtttcttctgatggtattcaagttggctcaagcatattatgagtctaccagaaaagagaatttaccgatatcaggacacaagcacagaaagcacagtcatcatgataaacatgaagataataaacaggaagaaaacaaagaaaacagaaaaagaccctcaagtctggaaagaagaaacaatagaaaagggaataagggaagatccaagagcccaagagaaacaggggggaaaaggcatgaatctagttctgaaaaaaaagaaagaaaaggatattcacctactcatagagaagaagaatatggaaaaaaccatcataactcaagtaaaaaagagaaaaacaagactgaaaatactagattaggagacaataggaagaggctaagtgaaagacttgaagagaaagaagacaatgaagaaggagtatatgattatgaaaatacaggaagaatgactcaaaaatggatacaatcaggccatattgccacatattacacaatccaggatgaagcctatgacaccactgatagtctattagaagaaaacaaaatatatgaaagatcaaggtcatctgatggcaaatcatcatctcaagtgaacaggtcaagacatgaaaatacaagccaggtaccattgcaggagtccaggacaagaaagcgtaggggatccagagttagccaggacagggacagtgagggacactcagaagactctgagaggcactctgggtcggcttccagaaaccatcatggatctgcgtgggagcagtcaagagatggctccagacaccccaggtcccatgatgaagacagagccagtcatgggcactctgcagacagctccagacaatcaggcactcgtcacgcagagacttcctctcgtggacagactgcatcatcccatgaacaggcaagatcaagtccaggagaaagacatggatccggccaccagcagtcagcagacagctccagacactcagccactgggcgcgggcaagcttcatctgcagtcagcgatcgtggacaccgggggtctagcggtagtcaggccagtgacagtgagggacattcagaaaactcagacacacaatcagtgtcaggccacggaaaggctgggctgagacagcagagccaccaagagtccacacgtggccggtcaggggaacggtctggacgttcagggtcttccctctaccaggtgagcactcatgaacagcctgactctgcccatggacggaccgggaccagcactggaggaagacaaggatcgcaccacgagcaggcacgagacagctccaggcattcagcgtcccaagagggtcaggacaccattcgtggacacccggggtcaagcagaggaggaaggcagggatcccaccacgagcaatcggtaaataggtctggacactcaggttcccatcacagccacaccacatcccagggaaggtctgatgcctcccatgggcagtcaggatccagaagtgcaagcagacaaacacgaaatgaggaacaatcaggagacggcaccaggcactcagggtcacgtcatcatgaagcttcctctcaggctgacagctctagacactcacaggtgggccagggacaatcatcggggcccaggacaagtaggaaccagggatccagtgttagccaggacagtgacagtcagggacactcagaagactctgagaggtggtctgggtctgcttccagaaaccatcatggatctgctcaggagcagtcaagagatggctccagacaccccaggtcccatcacgaagacagagctggtcatgggcactctgcagacagctccagaaaatcaggcactcgtcacacacagaattcctctagtggacaggctgcgtcatcccatgaacaggcaagatcaagtgcaggagaaagacatggatcccgccaccagctccagtcagcagacagctccagacactcaggcactgggcacggacaagcttcatctgcagtcagagacagtggacaccgagggtccagtggtagtcaggccactgacagtgagggacattcagaagactcagacacacagtcagtgtcaggccatggacaggctggtcaccatcagcagagccaccaagagtccgcacgtgaccggtcaggggaaaggtctcgacgttcagggtctttcctctaccagggaaggtctgatgcctcccgtgggcagtcaggatccagaagtgcaagcagaacaacacgtaatgaggaacaatcaagagacggctccaggcactcagggtcacgtcaccatgaagcttcctctcatgccgacatctctagacactcacaggcaggccagggacaatcagaggggtccaggacaagcaggcgccagggatccagtgttagccaggacagtgacagtgagggacattcagaagactctgagaggtggtctgggtctgcttccagaaaccatcgtggatctgctcaggagcagtcaagacatggctccagacaccccaggtcccatcacgaagacagagccggtcacgggcactctgcagacagctccagacaatcaggaactcctcacgcagagacttcctctggtggacaggctgcgtcatcccatgaacaggcaagatcaagtccaggagaaagacacggatcccgccaccagcagtcagcagacagctccagacactcaggcattccgcgcagacaagcttcatctgcagtcagagacagtggacactgggggtccagtggtagtcaggccagtgatagtgagggacattcagaggagtcagacacacagtcagtgtcaggccatggacaggatgggccccatcagcagagccaccaagagtccgcacgtgactggtcagggggaaggtctggacgttcagggtctttcatctaccaggtgagcactcatgaacagtctgagtctgcccatgggcggaccaggaccagcactggacgaagacaaggatcccaccacgagcaggcacgagacagctccaggcactcagcgtcccaagagggtcaggacaccattcgtgcacacccggggtcaaggagaggaggaaggcagggatcccaccatgagcaatcggtagatagatctggacactcagggtcccatcacagccacaccacatcccagggaaggtctgatgcctcccatgggcagtcaggatccagaagtgcaagcagacaaactcgtaaggacaaacaatcaggagacggctccaggcactcagggtcacgtcaccatgaagctgcctcttgggctgacagctctagacactcacaggtgggacaggaacaatcatcggggtccaggacaagcaggcaccagggatccagtgttagccaggacagtgacagtgagagacactcagacgactccgagaggttgtctgggtctgcttccagaaaccatcatggatcttctcgggagcagtcaagagatggctccagacaccctgggttccatcaagaagacagagccagtcacgggcactctgcagacagctccagacaatcaggcactcatcacacagagtcttcctctcatggacaggctgtgtcatcccatgaacaggcaagatcaagtccaggagaaagacatggatcccgccaccagcagtcagcagacagctccagacactcaggcattgggcacagacaagcttcatctgcagtcagagacagtggacaccgagggtccagtggtagtcaggtcactaacagtgagggacattcagaagactcagacacacagtcagtgtcagcccacggacaagctgggccccatcagcagagccacaaagagtccgcacgtggccagtcaggggaaagctctggacgttcaaggtctttcctctaccaggtgagctctcatgaacagtctgagtccacacacggacagactgcacccagcactggaggaagacaaggatcccgccatgagcaggcacgaaacagctctaggcactcagcatcccaagacggtcaggacaccattcgtggacacccggggtcaagcagaggaggaaggcagggatcctaccacgagcaatcagtagataggtctggacactcagggtaccatcacagccacaccacaccccagggaaggtctgatgcctcccatgggcagtcaggacccagaagtgcaagcaggcaaacaagaaatgaggaacaatcaggagacggctccaggcactcagggtcacgtcaccatgaaccttccactcgggccggcagctctagacactcacaggtgggccagggagaatcagcggggtccaagacaagcaggcgccagggatccagtgttagtcaggacagggacagtgagggacactcagaagactctgagaggcggtctgagtcggcttccagaaaccattatggatctgctcgggagcagtcaagacatggctccaggaaccccaggtcccatcaagaagatagagccagtcatgggcactctgcagagagctccagacaatcaggcactcgtcatgcagagacttcctctggtggacaggctgcatcatcccaggaacaggcaaggtcaagtccaggagaaagacatggatcccgccaccagcagtcagcagacagctccacagactcaggcactgggcgcagacaagattcatctgtagtcggagacagtggaaaccgagggtccagtggtagccaggccagtgacagcgagggacactcagaagagtcagacacacagtcagtgtcagcccacggacaggctgggccccatcagcagagccaccaagagtccacacgtggccagtcaggggaaaggtctggacgttcagggtctttcctctaccaggtgagcactcatgaacagtctgagtccgcccatggacgcacagggcccagcactggaggaagacaaagatcccgccacgagcaggcacgagacagctccaggcactcagcgtcccaagagggtcaggacaccattcgtggacacccagggtcaagcagaggaggaaggcagggatcccactatgagcaatcggtagatagttctggacactcagggtctcatcacagccacaccacgtcccaggaaaggtctgatgtctcccgtgggcagtcaggatccagaagtgtcagcagacaaacacgtaatgagaaacaatcaggagacggctccaggcactcagggtcgcgtcaccatgaagcttcctctcgggccgacagctctagacactcgcaggtgggccagggacaatcatcagggcccaggacaagcaggaaccagggatccagtgttagccaggacagtgacagtcagggacactcagaagactctgagaggtggtctgggtctgcttccagaaaccatcttggatctgcttgggagcagtcaagagatggctccagacaccctgggtcccatcacgaagacagagccggtcacgggcactctgcagacagctccagacaatcaggcactcgtcacacagagtcttcctctcgtggacaggctgcgtcatcccatgaacaggcaagatcaagtgcaggagaaagacatggatcccaccaccagctccagtcagcagacagctccagacactcaggcattgggcatggacaagcttcatctgcagtcagagacagtggacaccgagggtacagtggtagtcaggccagtgacagtgagggacattcagaagactcagacacacagtcagtgtcagcacagggaaaagctgggccccatcagcagagccacaaagagtccgcacgtggccagtcaggggaaagctctggacgttcagggtctttcctctaccaggtgagcactcatgaacagtctgagtccacccatggacagtctgcgcccagcactggaggaagacaaggatcccattatgatcaggcacaagacagctccaggcactcagcatcccaagagggtcaggacaccattcgtggacacccggggccaagcagaggaggaagacaggggtcccaccaagagcaatcggtagataggtctggacactcagggtctcatcacagccacaccacatcccagggaaggtctgatgcctcccgtgggcagtcaggatccagaagtgcaagcagaaaaacatatgacaaggaacaatcaggagatggctctaggcactcagggtcgcatcatcatgaagcttcctcttgggccgacagctctagacactcactggtgggccagggacaatcatcagggcccaggacaagcaggccccggggatccagtgttagccaggacagtgacagtgagggacactcagaagattctgagaggcggtctgggtctgcgtccagaaaccatcatggatctgctcaggagcagtcaagagatggctccagacaccccaggtcccatcacgaagacagagccggtcatgggcactctgcagagagctccagacaatcaggcactcatcatgcagagaattcctctggtggacaggctgcatcatcccatgaacaggcaagatcaagtgcaggagagagacacggatcccaccaccagcagtcagcagacagctccagacactcaggcattgggcacggacaagcttcatctgcagtcagagacagtggacaccgagggtccagtggtagtcaggccagtgacagtgagggacattcagaagactcagacacacagtcagtgtcagcccacggacaggctgggccccatcagcagagccaccaagagtccacacgtggccggtcagcaggaaggtctggacgttcagggtctttcctctaccaggtgagcactcatgaacagtctgagtccgcccatggacggaccgggaccagcactggaggaagacaaggatcccaccacaagcaggcacgagacagctccaggcactcaacgtcccaagagggtcaggacaccattcatggacacccggggtcaagcagtggaggaaggcagggatcccactacgagcaattggtagatagatctggacactcagggtctcatcacagccacaccacatcccagggaaggtctgatgcctcccatgggcactcaggatccagaagtgcaagcagacaaactcgtaacgatgaacaatcaggagacggctccaggcactcagggtcgcgtcaccatgaagcttcctctcgggccgacagctctggacactcgcaggtgggccagggacaatcagaggggcccaggacaagcaggaactggggatccagttttagccaggacagtgacagtcagggacactcagaagactctgagaggtggtctgggtctgcttccagaaaccatcatggatctgctcaggagcagctaagagatggctccagacaccccaggtcccatcaagaagacagagctggtcatgggcactctgcagacagctccagacaatcaggcactcgtcacacacagacttcctctggtggacaggctgcatcatcccatgaacaggcaagatcaagtgcaggagaaagacatggatcccaccaccagcagtcagcagacagctccagacactcaggcattgggcacggacaagcttcatctgcagtcagagacagtggacaccgagggtacagtggtagtcaggccagtgacaatgagggacattcagaagactcagacacacagtcagtgtcagcccacggacaggctgggtcccatcagcagagccaccaagagtccgcacgtggccggtcaggggaaacgtctggacattcaggatctttcctctaccaggtgagcactcatgaacagtctgagtcctcccatggatggacggggcccagcactagaggaagacaaggatcccgccatgagcaggcacaagacagctccaggcactcagcatcccaagacggtcaggacaccattcgtggacacccggggtcaagcagaggaggaaggcaggggtaccaccacgagcattcggtagatagctctggacactcagggtcccatcacagccacaccacatcccagggaaggtctgatgcctcccgtgggcagtcaggatccagaagtgcaagcagaacaacacgtaatgaggaacaatcaggagacggctccaggcactcagggtcgcgtcaccatgaagcttccactcatgccgacatctctagacactcacaggcagtccagggacaatcagaggggtccaggagaagcaggcgccagggatccagtgtgagccaggacagtgacagtgagggacattcagaagactctgagaggtggtctgggtctgcttccagaaaccatcatggatctgctcaggagcagctaagagatggctccagacaccccaggtcccatcaagaagacagagctggtcatgggcactctgcagacagctccagacaatcaggcactcgtcacacacagacttcctctggtggacaggctgcatcatcccatgaacaggcaagatcaagtgcaggagaaagacatggatcccaccaccagcagtcagcagacagctccagacactcaggcattgggcacggacaagcttcatctgcagtcagagacagtggacaccgagggtacagtggtagtcaggccagtgacaatgagggacattcagaagactcagacacacagtcagtgtcagcccacggacaggctgggtcccatcagcagagccaccaagagtccgcacgtggccggtcaggggaaacgtctggacattcaggatctttcctctaccaggtgagcactcatgaacagtctgagtcctcccatggatggacggggcccagcactagaggaagacaaggatcccgccatgagcaggcacaagacagctccaggcactcagcatcccaatacggtcaggacaccattcgtggacacccggggtcaagcagaggaggaaggcaggggtaccaccacgagcattcggtagatagctctggacactcagggtcccatcacagccacaccacatcccagggaaggtctgatgcctcccgtgggcagtcaggatccagaagtgcaagcagaacaacacgtaatgaggaacaatcaggagacagctccaggcactcagtgtcacgtcaccatgaagcttccactcatgccgacatctctagacactcacaggcagtccagggacaatcagaggggtccaggagaagcaggcgccagggatccagtgtgagccaggacagtgacagtgagggacattcagaagactctgagaggtggtctgggtctgcttccagaaaccatcgtggatctgttcaggagcagtcaaggcacggctccagacaccccaggtcccatcacgaagacagagccggtcacgggcactctgcagaccgctccagacaatcaggcactcgtcacgcagagacttcctctggtggacaggctgcatcatcccatgaacaggcaagatcaagtccaggagagagacacggatcccgccaccagcagtcagcagacagctccagacactcaggcattccgcgtggacaagcttcatctgcagtcagagacagtagacactgggggtccagtggtagtcaggccagtgatagtgagggacattcagaagagtcagacacacagtcagtgtcaggccatggacaggctgggccccatcagcagagccaccaagagtccgcacgtgaccggtcagggggaaggtctggacgttcagggtctttcctctaccaggtgagcactcatgaacagtctgagtctgcccatgggcggaccaggaccagcactggacgaagacaaggatcccaccacgagcaggcacgagacagctccaggcactcagcgtcccaagagggtcaggacaccattcgtggacacccggggtcaagcagaagaggaaggcagggatcccactacgagcaatcggtagataggtctggacactcagggtcccatcacagccacaccacatcccagggaaggtctgatgcctcccgtgggcagtcaggatccagaagtgccagcagacaaactcgtaatgacgaacaatcaggagatggctccaggcactcatggtcgcatcaccatgaagcttccactcaggcggacagctctagacactcacagtccggccagggacaatcagcggggcccaggacaagcaggaaccagggatccagtgttagccaggacagtgacagtcagggacactcagaagactctgagaggtggtctgggtctgcttccagaaaccatcgtggatctgctcaggagcagtcaagagatggctccagacaccccacgtcccatcacgaagacagagccggtcacgggcactctgcagagagctccagacaatcaggcactcatcatgcagagaattcctctggtggacaggctgcatcatcccatgaacaggcaagatcaagtgcaggagagagacatggatcccaccaccagcagtcagcagacagctccagacactcaggcattgggcacggacaagcttcatctgcagtcagagacagtggacaccgagggtccagtggtagtcaggccagtgacagtgagggacattcagaagactcagacacacagtcagtgtcagcccacggacaggctgggccccatcagcagagccaccaagagtccacacgtggccggtcagcaggaaggtctggacgttcagggtctttcctctaccaggtgagcactcatgaacagtctgagtctgcccatggacgggctgggcccagtactggaggaagacaaggatcccgccacgagcaggcacgagacagctccaggcactcagcgtcccaagagggtcaggacaccattcgtggacacccggggtcaaggagaggaggaagacagggatcctaccacgagcaatcggtagataggtctggacactcagggtcccatcacagccacaccacatcccagggaaggtctgatgcctcccatgggcagtcaggatccagaagtgcaagcagagaaacacgtaatgaggaacagtcaggagacggctccaggcactcagggtcgcgtcaccatgaagcttccactcaggctgacagctctagacactcacagtccggccagggtgaatcagcggggtccaggagaagcaggcgccagggatccagtgttagccaggacagtgacagtgaggcatacccagaggactctgagaggcgatctgagtctgcttccagaaaccatcatggatcttctcgggagcagtcaagagatggctccagacaccccggatcctctcaccgcgatacagccagtcatgtacagtcttcacctgtacagtcagactctagtaccgctaaggaacatggtcactttagtagtctttcacaagattctgcgtatcactcaggaatacagtcacgtggcagtcctcacagttctagttcttatcattatcaatctgagggcactgaaaggcaaaaaggtcaatcaggtttagtttggagacatggcagctatggtagtgcagattatgattatggtgaatccgggtttagacactctcagcacggaagtgttagttacaattccaatcctgttgttttcaaggaaagatctgatatctgtaaagcaagtgcgtttggtaaagatcatccaaggtattatgcaacgtatattaataaggacccaggtttatgtggccattctagtgatatatcgaaacaactgggatttagtcagtcacagagatactattactatgagtaa

SEQ ID NO: 1190 - DNA, 3925 bp, human
acagcacagacagattgacctattggggtgtttcgcgagtgtgagagggaagcgccgcggcctgtatttctagacctgcccttcgcctggttcgtggcgccttgtgaccccgggcccctgccgcctgcaagtcggaaattgcgctgtgctcctgtgctacggcctgtggctggactgcctgctgctgcccaactggctggcaagatgaagctctccctggtggccgcgatgctgctgctgctcagcgcggcgcgggccgaggaggaggacaagaaggaggacgtgggcacggtggtcggcatcgacctggggaccacctactcctgcgtcggcgtgttcaagaacggccgcgtggagatcatcgccaacgatcagggcaaccgcatcacgccgtcctatgtcgccttcactcctgaaggggaacgtctgattggcgatgccgccaagaaccagctcacctccaaccccgagaacacggtctttgacgccaagcggctcatcggccgcacgtggaatgacccgtctgtgcagcaggacatcaagttcttgccgttcaaggtggttgaaaagaaaactaaaccatacattcaagttgatattggaggtgggcaaacaaagacatttgctcctgaagaaatttctgccatggttctcactaaaatgaaagaaaccgctgaggcttatttgggaaagaaggttacccatgcagttgttactgtaccagcctattttaatgatgcccaacgccaagcaaccaaagacgctggaactattgctggcctaaatgttatgaggatcatcaacgagcctacggcagctgctattgcttatggcctggataagagggagggggagaagaacatcctggtgtttgacctgggtggcggaaccttcgatgtgtctcttctcaccattgacaatggtgtcttcgaagttgtggccactaatggagatactcatctgggtggagaagactttgaccagcgtgtcatggaacacttcatcaaactgtacaaaaagaagacgggcaaagatgtcaggaaagacaatagagctgtgcagaaactccggcgcgaggtagaaaaggccaaacgggccctgtcttctcagcatcaagcaagaattgaaattgagtccttctatgaaggagaagacttttctgagaccctgactcgggccaaatttgaagagctcaacatggatctgttccggtctactatgaagcccgtccagaaagtgttggaagattctgatttgaagaagtctgatattgatgaaattgttcttgttggtggctcgactcgaattccaaagattcagcaactggttaaagagttcttcaatggcaaggaaccatcccgtggcataaacccagatgaagctgtagcgtatggtgctgctgtccaggctggtgtgctctctggtgatcaagatacaggtgacctggtactgcttgatgtatgtccccttacacttggtattgaaactgtgggaggtgtcatgaccaaactgattccaaggaacacagtggtgcctaccaagaagtctcagatcttttctacagcttctgataatcaaccaactgttacaatcaaggtctatgaaggtgaaagacccctgacaaaagacaatcatcttctgggtacatttgatctgactggaattcctcctgctcctcgtggggtcccacagattgaagtcacctttgagatagatgtgaatggtattcttcgagtgacagctgaagacaagggtacagggaacaaaaataagatcacaatcaccaatgaccagaatcgcctgacacctgaagaaatcgaaaggatggttaatgatgctgagaagtttgctgaggaagacaaaaagctcaaggagcgcattgatactagaaatgagttggaaagctatgcctattctctaaagaatcagattggagataaagaaaagctgggaggtaaactttcctctgaagataaggagaccatggaaaaagctgtagaagaaaagattgaatggctggaaagccaccaagatgctgacattgaagacttcaaagctaagaagaaggaactggaagaaattgttcaaccaattatcagcaaactctatggaagtgcaggccctcccccaactggtgaagaggatacagcagaaaaagatgagttgtagacactgatctgctagtgctgtaatattgtaaatactggactcaggaacttttgttaggaaaaaattgaaagaacttaagtctcgaatgtaattggaatcttcacctcagagtggagttgaaactgctatagcctaagcggctgtttactgcttttcattagcagttgctcacatgtctttgggtgggggggagaagaagaattggccatcttaaaaagcaggtaaaaaacctgggttagggtgtgtgttcaccttcaaaatgttctatttaacaactgggtcatgtgcatctggtgtaggaagttttttctaccataagtgacaccaataaatgtttgttatttacactggtctaatgtttgtgagaagcttctaattagatcaattacttattttaggaaatttaagactagatactcgtgtgtggggtgaggggagggagtatttggtatgttgggataaggaaacacttctatttaatgcttccagggattttttttttttttttttaaccctcctgggcccaagtgatccttccacctcagtctcccagctaattgagaccacaggcttgttaccaccatgctcggcttttgcattaatctaagaaaaggggagagaagttaatccacatctttactcaggcaaggggcatttcacagtgcccaagagtggggttttcttgaacatacttggtttcctatttccccttatctttctaaaactgcctttctggtggctttttttaaaattattactaatgatgcttttatagctgcttggattctctgagaaatgatggggagtgagtgatcactggtattaactttatacacttggatttcatttgtaactttaggatgtaaaggtatattgtgaaccctagctgtgtcagaatctccatccctgaaatttctcattagtggtactggggtgggatcttggatggtgacattgaaactacactaaatcccctcactatgaatgggttgttaaaggcaatggtttgtgtcaaaactggtttaggattacttagattgtgttcctgaagaaaagagtccaggtaaatggtatgatcaataaaggacaggctggtgctaacataaaatccaatattgtaatcctagcactttgggaggccaaggcgggtggatcacaaggtcaagagatagagaccatctttgccaacatggtgaaactccatctctactgaaaatacaaaaattagctgggcgtggtagtgcaagctgaaggctgaggcaggagaatcactcgaacccgggaggcagaggttgcagtgagccgagatcacaccactgtactccagcccggcactccagcctggcgacaagagtgagactccacctcaaaaaaaaaaaaaagaatccaatactgcccaaggataggtattttatagatgggcaactggctgaaaggttaattctctagggctagtagaactggatcccaacaccaaactcttaattagacctaggcctcagctgcactgcccgaaaagcatttgggcagaccctgagcagaatactggtctcaggccaagcccaatacagccattaaagatgacctacagtgctgtgtaccctggggcaatagggttaaatggtagttagcaactagggctagtcttcccttacctcaaaggctctcactaccgtggaccacctagtctgtaactctttctgaggagctgttactgaatattaaaaagatagacttcaaaaaaaaaaaaaaaaaa

SEQ ID NO: 1191 - DNA, 1844 bp, human
cgggcaggtggggaacctccctgaagagtgccctggtcacagcacccttgaagacagccattggccatggggacccaaccagagcctggcctgggagccaggatggccatccacaaagccttggtgatgtgcctgggactgcctctcttcctgttcccaggggcctgggcccagggccatgtcccacccggctgcagccaaggcctcaaccccctgtactacaacctgtgtgaccgctctggggcgtggggcatcgtcctggaggccgtggctggggcgggcattgtcaccacgtttgtgctcaccatcatcctggtggccagcctcccctttgtgcaggacaccaagaaacggagcctgctggggacccaggtattcttccttctggggaccctgggcctcttctgcctcgtgtttgcctgtgtggtgaagcccgacttctccacctgtgcctctcggcgcttcctctttggggttctgttcgccatctgcttctcttgtctggcggctcacgtctttgccctcaacttcctggcccggaagaaccacgggccccggggctgggtgatcttcactgtggctctgctgctgaccctggtagaggtcatcatcaatacagagtggctgatcatcaccctggttcggggcagtggcgagggcggccctcagggcaacagcagcgcaggctgggccgtggcctccccctgtgccgtcgccaacatggactttgtcatggcactcatctacgtcatgctgctgctgctgggtgccttcctgggggcctggcccgccctgtgtggccgctacaagcgctggcgtaagcatggggtctttgtgctcctcaccacagccacctccgttgccatatgggtggtgtggatcgtcatgtatacttacggcaacaagcagcacaacagtcccacctgggatgaccccacgctggccatcgccctcgccgccaatgcctgggccttcgtcctcttctacgtcatccccgaggtctcccaggtgaccaagtccagcccagagcaaagctaccagggggacatgtaccccacccggggcgtgggctatgagaccatcctgaaagagcagaagggtcagagcatgttcgtggagaacaaggccttttccatggatgagccggttgcagctaagaggccggtgtcaccatacagcgggtacaatgggcagctgctgaccagtgtgtaccagcccactgagatggccctgatgcacaaagttccgtccgaaggagcttacgacatcatcctcccacgggccaccgccaacagccaggtgatgggcagtgccaactcgaccctgcgggctgaagacatgtactcggcccagagccaccaggcggccacaccgccgaaagacggcaagaactctcaggtctttagaaacccctacgtgtgggactgagtcagcggtggcgaggagaggcgggcggatttggggagggccctgaggacctggccccgggcaagggactctccaggctcctcctccccctggcaggccagcaacatgtgccccagatctggaagggcctccctctctgccagtgtttgggtgggtgtcatgggtgtccccacccactcctcagtgtttgtggagtcgaggagccaaccccagcctcctgccaggatcacctcggcggtcacactccagccaaatagtgttctcggggtggtggctgggcagcgcctatgtttctctggagattcctgcaacctcaagagacttcccaggcgctcaggcctggatcttgctcctctgtgaggaacaagggtgcctaataaatacatttctgctttattaaaaaaaaaaaaaaaaaa

SEQ ID NO: 1192 - DNA, 4859 bp, human
cacgttgggtgacataatggggtttttttaattatagattcacactgcatttattcatcacccctgtcctctcatccataactcaaatttactaccagcaacacaaaatacaaagatgtgtccagtttcactacagctcttcgcgtttacaagtgtcgagcgcttgctttcggaacgcccttgtgattggccgagccaatgccagtgacatcaaccaacttacttttgattggaaggctggttgctgggactgtagcgtttgcaggaagtcacttaactgtttgggagctggaaaaccgaagctgaagttctcttttgccataggaacgagcgcaactgactaggaaagatgtgtcccaaagctccgcaagctggaacgtgagccaggaggcccggaccggccacgggaccgcgaggcactccgaaagtgtgcggctgccccttccctgcctcccagctgttacccttttaaatgtcagtgttcgaggctgtaggggtagcacgaggcagcgaaacggaacagtcggattggccgcacgcctcagttctagacgcacctctccaccgaagccgttctgactggcagggggagaaagtaaacagagttgaatcaccctccccactggccaattggagggggtttggtttgtgacgtgatgggattctgcgaaattgttactgagcaagagaatgccggaacgtgcggaccggccggagcaggggttcagaagccgtcagtggactcgggaaaaagtgtctcttagacctggcgctcggcggggccctcgccacccgcgtcggggtgatcgggtgaatgtcctggggctttggctcgacggcgaggcggccgagggcgtgcacctctcttgcagtttcctctcccagcgcctcgggggcgttttcagtcgaataaacttgcgaccgccacgtgtggcatctttccaagggagccggctcagaggggccggcgcgcccgtcgggggatcgcggccggcgcggggcaggggcggcggctagaggcggcggcgcggcggagcccggggccgtggatgctgcgtgcggaggcgctgccggttacgtaaagatgaggggctgaggtcgcctcggcgctcctgcgagtcggaagcgccccgcgcccccgcccccttggccgccgcgccgtgccgggcgggcgggtcgtcgtccgaggccagggagggcgagccgaacctccgcagccaccgccaagtttgtccgcgccgcctgggctgccgtcgcccgcaccatgtccgcggccgcctacatggacttcgtggctgcccagtgtctggtttccatttcgaaccgcgctgcggtgccggagcatggggtcgctccggacgccgagcggctgcgactacctgagcgcgaggtgaccaaggagcacggtgacccgggggacacctggaaggattactgcacactggtcaccatcgccaagagcttgttggacctgaacaagtaccgacccatccagaccccctccgtgtgcagcgacagtctggaaagtccagatgaggatatgggatccgacagcgacgtgaccaccgaatctgggtcgagtccttcccacagcccggaggagagacaggatcctggcagcgcgcccagcccgctctccctcctccatcctggagtggctgcgaaggggaaacacgcctccgaaaagaggcacaagtgcccctacagtggctgtgggaaagtctatggaaaatcctcccatctcaaagcccattacagagtgcatacaggtgaacggcccttcccctgcacgtggccagactgccttaaaaagttctcccgctcagacgagctgacccgccactaccggacccacactggggaaaagcagttccgctgtccgctgtgtgagaagcgcttcatgaggagtgaccacctcacaaagcacgcccggcggcacaccgagttccaccccagcatgatcaagcgatcgaaaaaggcgctggccaacgctttgtgaggtgctgcccgtggaagccagggagggatggaccccgaaaggacaaaagtactcccaggaaacagacgcgtgaaaactgagccccagaagaggcacacttgacggcacaggaagtcactgctctttggtcaatattctgattttcctctccctgcattgtttttaaaaagcacattgtagcctaagatcaaagtcaacaacactcggtccccttgaagaggcaactctctgaacccgtctctgactgttggagggaaggcaaatgcttttgggttttttggtttttgtttttgtttttttttctccttttatttttttgcgggggagggtagggagtgggtgggggggagggggtaaggccaagactgggtagattttaaagattcaacactggtgtacatatgtccgctgggtgagttgacctgtggcctcgcacagtgattctaggccctttatgcttgctgtctctcagaattgttttcttaccttttaatgtaatgacgagtgtgcttcagtttgtttagcaaaaccactctcttgaatcacgttaacttttgagattaaaaaaaaaaacgccatagcacagctgtctttatgcaagcaagagcacatctactccagcatgatctgtcatctaaagacttgaaaacaaaaaacagttacttatagtcaatgggtaagcagagtctgaatttatactaatcaagacaaacctttgaaaggttacactaagtacagaacttttaaaccttgctttgtatgagttgtactttttgaacataagctgcacttttattttctaatgcagaggatgaataagttaaatacatgctttgaggatagaagcagatgttctgtttggcaccacgttataatctgcttattttacaatatacacgtttccctaagaaatcatgcgcagagatgtgagggcagaatatacacaacagatgctgaaggagaaggagggtagtgttttgcaaaagaaaaagaaaagaaccaacagaattttaactctattaacttttccaaattttcctatgcttttagttaacatcattattgtatcctaatgccactaggggagagagcttttgactctgttgggttttatttgaatgtgtgcataacagtaatgagatctggaaacacctattttttggggaaaaaggtttgttggtctccttcctgtgttcctacaaaactcccactctcaggtgcaagagttatgtagaaggaaagggagctgaaataggaacagaaaaatcaacccctataactagtgaacaccaagggaaaataccacaatgatttcagaggagactctgcaaaatcgtcccttgtggagaatgcaggcaacatggaatactacgaatgaaatcacatcactgtatcttttacatcaatagcctcaccactaatatatcttgtatctaggtgtctataatggctgaaaccactacatccatctatgccatttacctgaaaacttaactgtggcctttatgaggccagaaaagtgaactgagttttgtagttaagacctcaaatgaggggagtcagcagtgatcatgggggaaatgtttacattttttttttcttcagaagtaacgctttctgatgattttatctgatatttaaaacagggagctatggtgcactctagtttatacttgcgctctgaaatgtgtaaacatagggtgcctacctatttcacctgacccatactcgtttctgattcagaatcagtgtgggctcctgcagtgggcgcgggtcacggctgactccaacttccaatacaacagccatcactagcacagtgtttttttgtttaaccaacgtagtgttattagtagttctataaagagaactgcttttaacattagggactgggagcagtccatgggataaaaaggaaagtgttttctcacgagaaaacatgtcaggaaaaataaagaacactttctacctctgtttcagatttttgaaacacttattttaaaccaaattttaatttctgtgtccaaaataagttttaaggacatctgttcttccatacgaaataggttaggctgcctatttctcactgagctcatggaatggttctgcttatgatactctgcacgctgccttttagtgagtgaggagtttggggttgcctagcacttgctaacttgtaaaaagtcatctttccctcacagaaagaaacgaaagaaagcaaagcaaagtcagtgaaagacaatctttatagtttcaggagtaaatctaaatgtggcttttgtcaagcacttagatggatataaatgcagcaacttgttttaaaaaaatgcacatttacttcccaaaaaagttgttacttgccttttcaagtgtgacaaactcacatttgatattctcttatatgttatagtaatgtaacgtataaactcaagcctttttattctttgtgattaaatcctgttttaaaatgtcacaaaacaggaaccagcattctaattagatttactatatcaagatatggttcaaataggactactagagttcattgaacactaaaactatgaaacaattactttttatattaaaaagaccatggatttaacttatgaaaatccaaatgcaggatagtaatttttgtttacttttttaaccaaactgaatttttgaaagactattgcaggtgtttaaaaagaaagaaaagttgttttatctaatactgtaagtagttgtcatattctggaaaatttaatagttttagagttaagatatctcctctctttggttagggaagaagaaagcccttcaccattgtggaatgatgccctggctttaaggtttagctccacatcatgcttctctt

SEQ ID NO: 1193 - DNA, 3071 bp, human
ccgccattttgtgagaagcaaggtggcctccacgtttcctgagcgtcttcttcgcttttgcctcgaccgccccttgaccacagacatgtctcgggatcggttccggagtcgtggcggtggcggtggtggcttccacaggcgtggaggaggcggcggccgcggcggcctccacgacttccgttctccgccgcccggcatgggcctcaatcagaatcgcggccccatgggtcctggcccgggccagagcggccctaagcctccgatcccgccaccgcctccacaccaacagcagcaacagccaccaccgcagcagccaccgccgcagcagccgccaccgcatcagccgccgccgcatccacagccgcatcagcagcagcagccgccgccaccgccgcaggactcttccaagcccgtcgttgctcagggacccggccccgctcccggagtaggcagcgcaccaccagcctccagctcggccccgcccgccactccaccaacctcgggggccccgccagggtccgggccaggcccgactccgaccccgccgcctgcagtcacctcggcccctcccggggcgccgccacccaccccgccaagcagcggggtccctaccacacctcctcaggccggaggcccgccgcctccgcccgcggcagtcccgggcccgggtccagggcctaagcagggcccaggtccgggtggtcccaaaggcggcaaaatgcctggcgggccgaagccaggtggcggcccgggcctaagtacgcctggcggccaccccaagccgccgcatcgaggcggcggggagccccgcgggggccgccagcaccacccgccctaccaccagcagcatcaccaggggcccccgcccggcgggcccggcggccgcagcgaggagaagatctcggactcggaggggtttaaagccaatttgtctctcttgaggaggcctggagagaaaacttacacacagcgatgtcggttgtttgttgggaatctacctgctgatatcacggaggatgaattcaaaagactatttgctaaatatggagaaccaggagaagtttttatcaacaaaggcaaaggattcggatttattaagcttgaatctagagctttggctgaaattgccaaagccgaactggatgatacacccatgagaggtagacagcttcgagttcgctttgccacacatgctgctgccctttctgttcgtaatctttcaccttatgtttccaatgaactgttggaagaagcctttagccaatttggtcctattgaaagggctgttgtaatagtggatgatcgtggaagatctacagggaaaggcattgttgaatttgcttctaagccagcagcaagaaaggcatttgaacgatgcagtgaaggtgttttcttactgacgacaactcctcgtccagtcattgtggaaccacttgaacaactagatgatgaagatggtcttcctgaaaaacttgcccagaagaatccaatgtatcaaaaggagagagaaacccctcctcgttttgcccagcatggcacgtttgagtacgaatattctcagcgatggaagtctttggatgaaatggaaaaacagcaaagggaacaagttgaaaaaaacatgaaagatgcaaaagacaaattggaaagtgaaatggaagatgcctatcatgaacatcaggcaaatcttttgcgccaagatctgatgagacgacaggaagaattaagacgcatggaagaacttcacaatcaagaaatgcagaaacgtaaagaaatgcaattgaggcaagaggaggaacgacgtagaagagaggaagagatgatgattcgtcaacgtgagatggaagaacaaatgaggcgccaaagagaggaaagttacagccgaatgggctacatggatccacgggaaagagacatgcgaatgggtggcggaggagcaatgaacatgggagatccctatggttcaggaggccagaaatttccacctctaggaggtggtggtggcataggttatgaagctaatcctggcgttccaccagcaaccatgagtggttccatgatgggaagtgacatgcgtactgagcgctttgggcagggaggtgcggggcctgtgggtggacagggtcctagaggaatggggcctggaactccagcaggatatggtagagggagagaagagtacgaaggcccaaacaaaaaaccccgattttagatgtgatatttaggctttcattccagtttgttttgtttttttgtttagataccaatcttttaaattcttgcattttagtaagaaagctatctttttatggatgttagcagtttattgacctaatatttgtaaatggtctgtttgggcaggtaaaattatgtaatgcagtgtttggaacaggagaatttttttttcctttttatttctttattttttcttttttactgtataatgtccctcaagtttatggcagtgtaccttgtgccactgaatttccaaagtgtaccaatttttttttttttactgtgcttcaaataaatagaaaaatagttataatattggatcttcaactttgccattcatgcttctatgcatattaggctacgtattccacattgaaagcatgagagtgtctaggcctttgaatggcatatgccatttctgggaaatgcatctggaggctaagtattgctttctacaaataattgccccctttgttttaaaaagaagaaatgcatattgaagtagtttgatgatttgtttggcatataggaagcacgctggtgctaagtattttttaaatggttatgtaagcaaagctgaactgtaaatcttcaggaatatgtattaagattgtggaatgggtgtaagacaattggtagggggtgaaagtgggtttgattaaatggatcttttatggccctatgatctatcctttacttgaaagcttttgaaaagtggaaaggtcattttgttgcatttccccatttcttgtttttaaaagaccaacaaatctcaagccctataaatggcttgtattgaacttttacatttgaattaaagatgttaaacatgaaaaaaa

SEQ ID NO: 1194 - DNA, 1122 bp, human
cttcaggtccagggtggacgcatgccctcaggtgcgggcgtcttgcgagtcggcctcgcagctctgtggaagccgcacgcggcttgtcggaaaatcaaggcgttctgagttctagatggttaatagcaggttcttcggtgtctgcagtcgacgaacgactggtgtaggcgtttgctgtgagaatggagaatgcaggggaacgcccctgactgagaagcgggccctgggaaacgattgtgaacgcgtgaatgaattgatgactaaaatccgctgcgggggtcctacagcgcagatggtaatgccgttctgactggctgggaacggcaccttagcagatacttaaaaggcgccttctgtgtgccactgtcactgccaacttggtgactcatttaaaactcataaccagccggtgaggtcggtacttcgctcctcctcattctgcggaggggaaagcagcacggaaatgccctgtgactggcagcggaaaaggcgaccaccgcttgtgtgtgggtgtcccgacgtccggagggggcaggagtttccacgggtcctgggacagagctcacctgttttgttttgaattacacttatttatatgcaactacaggcctgacgctagcggtgaagaaggcagatacagccttttaaggagttggcagatgagtgggagagagaaaactaatctcattatcggccacaggctgtggtcagtgttttgaaggaaaagtacagggatgtttggcaactgtggtatttcaggtttgaccttaaatccttacttaaaccaatttttacaaggattggtctaggtgcccgggcgcggtggctcacgcctataatcccagcactttaggaggccgaggcgggcggatcacgaaatcaggagatcgagaccgtcgtggctaacacggtgaaaccccatctctactaaaagaatacaaaaaattagccgggcgtggtggcgggcacctgtagtcccagctattcgggaggctgaggcaggagaatggcgtgaacccgggaggcggagctttcagtgagccgagatcgcgccactgcactccagcctgggcaacagagccagactccgtctcaaaaaaaaaaaaaaaaaaaaaaaaaaaa

SEQ ID NO: 1195 - DNA, 4752 bp, human; identical to SEQ ID NO: 583

SEQ ID NO: 1196 - DNA, 2704 bp, human
gcttagtgtaaccagcggcgtatattttttaggcgccttttcgaaaacctagtagttaatattcatttgtttaaatcttattttatttttaagctcaaactgcttaagaataccttaattccttaaagtgaaataattttttgcaaaggggtttcctcgatttggagctttttttttcttccaccgtcatttctaactcttaaaaccaactcagttccatcatggtgatgttcaagaagatcaagtcttttgaggtggtctttaacgaccctgaaaaggtgtacggcagtggcgagagggtggctggccgggtgatagtggaggtgtgtgaagttactcgtgtcaaagccgttaggatcctggcttgcggagtggctaaagtgctttggatgcagggatcccagcagtgcaaacagacttcggagtacctgcgctatgaagacacgcttcttctggaagaccagccaacaggtgagaatgagatggtgatcatgagacctggaaacaaatatgagtacaagttcggctttgagcttcctcaggggcctctgggaacatccttcaaaggaaaatatgggtgtgtagactactgggtgaaggcttttcttgaccgcccgagccagccaactcaagagacaaagaaaaactttgaagtagtggatctggtggatgtcaatacccctgatttaatggcacctgtgtctgctaaaaaagaaaagaaagtttcctgcatgttcattcctgatgggcgggtgtctgtctctgctcgaattgacagaaaaggattctgtgaaggtgatgagatttccatccatgctgactttgagaatacatgttcccgaattgtggtccccaaagctgccattgtggcccgccacacttaccttgccaatggccagaccaaggtgctgactcagaagttgtcatcagtcagaggcaatcatattatctcagggacatgcgcatcatggcgtggcaagagccttcgggttcagaagatcaggccttctatcctgggctgcaacatccttcgagttgaatattccttactgatctatgttagcgttcctggatccaagaaggtcatccttgacctgcccctggtaattggcagcagatcaggtctaagcagcagaacatccagcatggccagccgaaccagctctgagatgagttgggtagatctgaacatccctgataccccagaagctcctccctgctatatggatgtcattcctgaagatcaccgattggagagcccaacaactcctctgctagatgacatggatggctctcaagacagccctatctttatgtatgcccctgagttcaagttcatgccaccaccgacttatactgaggtggatccctgcatcctcaacaacaatgtgcagtgagcatgtggaagaaaagaagcagctttacctacttgtttctttttgtctctcttcctggacactcactttttcagagactcaacagtctcgtcaatggagtgtgggtccaccttagcctctgacttcctaatgtaggaggtggtcagcaggcaatctcctgggccttaaaggatgcggactcatcctcagccagcgcccatgttgtgatacaggggtgtttgttggatgggtttaaaaataactagaaaaactcaggcccatccattttctcagatctccttgaaaattgaggccttttcgatagtttcgggtcaggtaaaaatggcctcctggcgtaagcttttcaaggttttttggaggctttttgtaaattgtgataggaactttggaccttgaacttacgtatcatgtggagaagagccaatttaacaaactaggaagatgaaaagggaaattgtggccaaaactttgggaaaaggaggttcttaaaatcagtgtttcccctttgtgcacttgtagaaaaaaaagaaaaaccttctagagctgatttgatggacaatggagagagctttccctgtgattataaaaaaggaagctagctgctctacggtcatctttgcttagagtatactttaacctggcttttaaagcagtagtaactgccccaccaaaggtcttaaaagccatttttggagcctattgcactgtgttctcctactgcaaatattttcatatgggaggatggttttctcttcatgtaagtccttggaattgattctaaggtgatgttcttagcactttaattcctgtcaaattttttgttctccccttctgccatcttaaatgtaagctgaaactggtctactgtgtctctagggttaagccaaaagacaaaaaaaattttactacttttgagattgccccaatgtacagaattatataattctaacgcttaaatcatgtgaaagggttgctgctgtcagccttgcccactgtgacttcaaacccaaggaggaactcttgatcaagatgcccaaccctgtgatcagaacctccaaatactgccatgagaaactagagggcaggtgttcataaaagccctttgaacccccttcctgccctgtgttaggagatagggatattggcccctcactgcagctgccagcacttggtcagtcactctcagccatagcactttgttcactgtcctgtgtcagagcactgagctccacccttttctgagagttattacagccagaaagtgtgggctgaagatggttggtttcatgtgggggtattatgtaccc

SEQ ID NO: 1197 - DNA, 1903 bp, human
gatgagacagaatctacagaaacatctgtcctgaaaagtcacctggttaatgaagttcctgtcctagcaagtccggacttgctctctgaagtttctgagatgaaacaagatttgatcaaaatgaccgccatcttgaccacagatgtgtctgataaggcaggttctattaaagtgaaggagctggtgaaggctgctgaggaagagccaggagagccttttgaaatcgttgaaagagttaaagaggacttagagaaagtgaatgaaatcctgagaagtggaacctgcacaagagatgaaagcagtgtgcagagctctcggtctgagagaggattagttgaagaggaatgggttattgtcagtgatgaggaaatagaagaggctaggcaaaaagcacctttagaaatcactgaatatccatgtgtagaagttagaatagataaagagatcaaaggaaaagtagagaaagactcaactgggctagtgaactaccttactgatgatctgaatacctgtgtgcctcttcccaaagagcagctgcagacagttcaagataaggcagggaagaaatgtgaggctctggctgttggcaggagctctgaaaaggaagggaaagacatacccccagatgagacacagagtacacagaaacagcacaaaccaagcttgggaataaagaagccagtaagaaggaaattaaaagaaaagcagaaacaaaaagaggaaggtttacaagctagtgcagagaaagctgaacttaaaaaaggtagttcagaagagtcattaggtgaagacccaggtttagcccctgaaccccttcccactgtcaaggccacatctcctttgatagaagaaactcccattggttccataaaggacaaagtaaaggcccttcagaagcgagtggaagatgaacagaaaggtcgaagcaagttgcccatcagagtcaaaggcaaggaggacgtgccaaaaaagaccacccacaggccacatccagctgcgtcaccctctctgaagtcagagagacatgcgccagggtctccctcccctaaaacagaaagacactctactctttcctcttccgcaaaaactgaaaggcaccctccagtatcaccatcaagtaaaactgagaaacactcacctgtgtcaccctctgcaaaaacggaaagacattcacctgcgtcatcatcgagtaaaactgagaaacactcacctgtatcaccctcgacaaaaactgaaaggcactctcctgtgtcatctacaaaaacagaaagacacccacctgtttcgccttcaggcaaaacagacaaacgtccacctgtatcgccctccgggaggacagaaaaacacccgccagtatcgcctgggagaacagaaaaacgcttgcctgtttcaccctccggaagaacggacaagcaccaacctgtatcaacagctgggaaaactgagaagcacctgcctgtgtcaccttctggcaaaacagaaaagcaaccacctgtatcccccacttcaaaaacagagaggattgaggaaaccatgtctgttcgggagctgatgaaggctttccagtcaggtcaggacccttctaaacataaaactggactctttgagcacaaatcagcaaaacaaaagcagccacaagagaaaggtaaagttcgggtagaaaaagaaaaggggccgatactaacccagagagaagctcagaaaacagagaatcagacaatcaaacgaggccagagactcccggtaacgggcacagcagaatccaaaagaggagttcgtgtttcctccataggagttaagaaagaagatgcagctggaggaaaggagaaagttctcagccacaaaatacctgaacctgttcagtcagtgcctgaagaagaaagccacagagagagcgaagtgc

SEQ ID NO: 1198 - DNA, 2051 bp, human
cgagacctactccacaggtccagccggccggtgagcgcctggggaccgcagaggtgagagtcgcgcccgggagtccgccgcctgcgccaggatggagttcgtgaaatgccttggccaccccgaagagttctacaacctggtgcgcttccggatcgggggcaagcggaaggtgatgcccaagatggaccaggactcgctcagcagcagcctgaaaacttgctacaagtatctcaatcagaccagtcgcagtttcgcagctgttatccaggcgctggatggggaaatgcgcaacgcagtgtgcatattttatctggttctccgagctctggacacactggaagatgacatgaccatcagtgtggaaaagaaggtcccgctgttacacaactttcactctttcctttaccaaccagactggcggttcatggagagcaaggagaaggatcgccaggtgctggaggacttcccaacgatctcccttgagtttagaaatctggctgagaaataccaaacagtgattgccgacatttgccggagaatgggcattgggatggcagagtttttggataagcatgtgacctctgaacaggagtgggacaagtactgccactatgttgctgggctggtcggaattggcctttcccgtcttttctcagcctcagagtttgaagaccccttagttggtgaagatacagaacgtgccaactctatgggcctgtttctgcagaaaacaaacatcatccgtgactatctggaagaccagcaaggaggaagagagttctggcctcaagaggtttggagcaggtatgttaagaagttaggggattttgctaagccggagaatattgacttggccgtgcagtgcctgaatgaacttataaccaatgcactgcaccacatcccagatgtcatcacctacctttcgagactcagaaaccagagtgtgtttaacttctgtgctattccacaggtgatggccattgccactttggctgcctgttataataaccagcaggtgttcaaaggggcagtgaagattcggaaagggcaagcagtgaccctgatgatggatgccaccaatatgccagctgtcaaagccatcatatatcagtatatggaagagatttatcatagaatccccgactcagacccatcttctagcaaaacaaggcagatcatctccaccatccggacgcagaatcttcccaactgtcagctgatttcccgaagccactactcccccatctacctgtcgtttgtcatgcttttggctgccctgagctggcagtacctggccactctctcccaggtaacagaagactatgttcagactggagaacactgatcccaaatttgtccatagctgaagtccaccataaagtggatttactttttttctttaaggatggatgttgtgttctctttatttttttcctactactttaatccctaaaagaacgctgtgtggctgggacctttaggaaagtgaaatgcaggtgagaagaacctaaacatgaaaggaaagggtgcctcatcccagcaacctgtccttgtgggtgatgatcactgtgctgcttgtggctcatggcagagcattcagtgccacggtttaggtgaagtcgctgcatatgtgactgtcatgagatcctacttagtatgatcctggctagaatgataattaaaagtatttaatttgaagcaccatttgaatgttcgtaatagtagaaaatgatgtgaattttctttctgttcggctcctatttttctcatcattttgttttctttaattgggttgaatggagtagatagaaatatttatggtttaggtaacagttagatgtttcctaagaatgcaaactgccttttccacacaaaggctgggaataaaattctgggtattctcgtattctcatttaaaggagtttagctttcagagagaaacagcaggattgcttttgaccttttagaagattggtctccagtaaaggtggacatttttgagatttttataataaagaatttaattgctctgcaaaaaaaaaaaaaaaaaa

SEQ ID NO: 1199 - DNA, 1099 bp, human
gcggctgcagcgctctcgtcttctgcggctctcggtgccctctccttttcgtttccggaaacatggcctccggtgtggctgtctctgatggtgtcatcaaggtgttcaacgacatgaaggtgcgtaagtcttcaacgccagaggaggtgaagaagcgcaagaaggcggtgctcttctgcctgagtgaggacaagaagaacatcatcctggaggagggcaaggagatcctggtgggcgatgtgggccagactgtcgacgacccctacgccacctttgtcaagatgctgccagataaggactgccgctatgccctctatgatgcaacctatgagaccaaggagagcaagaaggaggatctggtgtttatcttctgggcccccgagtctgcgccccttaagagcaaaatgatttatgccagctccaaggacgccatcaagaagaagctgacagggatcaagcatgaattgcaagcaaactgctacgaggaggtcaaggaccgctgcaccctggcagagaagctggggggcagtgccgtcatctccctggagggcaagcctttgtgagccccttctggccccctgcctggagcatctggcagccccacacctgcccttgggggttgcaggctgcccccttcctgccagaccggaggggctggggggatcccagcagggggagggcaatcccttcaccccagttgccaaacagaccccccaccccctggattttccttctccctccatcccttgacggttctggccttcccaaactgcttttgatcttttgattcctcttgggctgaagcagaccaagttccccccaggcaccccagttgtggggggagcctgtattttttttaacaacatccccattccccacctggtcctcccccttcccatgctgccaacttctaaccgcaatagtgactctgtgcttgtctgtttagttctgtgtataaatggaatgttgtggagatgacccctccctgtgccggctggttcctctcccttttcccctggtcacggctactcatggaagcaggaccagtaagggaccttcgattaaaaaaaaaaaagacaataataaaaaaaaaaaaaaa

SEQ ID NO: 1200 - DNA, 471 bp, human
atggctctaccggagcttgaggatctttactttagaatgacaagggacatcgcccccaggatcggatatcctaaacccgtcctgctgcattcttccttcttctctgacctgcagggcatccagaacaaaatgagtgccagtgaccccagctcttttatcttcctcaccaacatggccatgcagatcaagaccaagatcagtaagcatgcattttctggagagagagacaccatcgaggagcacaggcactttgggggcaactgtgttgtggacgtgtctttcatgtacttgaccttcctcaaggatgaagacaagctcgagcagatgaggaaggatgacaccagcagagacatgctcactggtgacctcaagaagatgctcatagaggttctccagcccgtgattacagagcaccaagcccagtgcaaggaggtcatggacgagttagtgaaagagttcactaacgaatga

SEQ ID NO: 1201 - DNA, 4502 bp, human
cgagggaagaggccggagggagatcgcggaggggagggggcgggaggggggtggggtatcctgagtcgtccgtggtccggagtctggaaggccctagagcggcgccagtcgacccgcctcgccacaacttgcccagaccagacacgtttcatcctgcgccctgcaagaaggagccggcctgcctctctccgctttgctgctcctcggcctccgcgggcccggcccgcgtcagcagcgaccctggggtctgggtcccctgtgtcgcccccgcccgcctgcagcgcccggcacccgcccaggagcgcgcagctggggttctagggacgtatacttgagcaagagagaccacagctcttgttcccgctgatcctgcagcccagtggatggagtccagaatctacagacctgccaggaaagaaaaaaaattcctgatgtctggtccaagcaggaattccccggtggattggggaatgtctggcttttcctcagcttattgatctctgtggtaaccactggaggcccccagaagacccatagaaatgagaggcctgaggtctacaagtcgctgctagaaatattttagcctctccaaagcccagaatgcagccccgacccaagtttgtaagggttctgggtgcacgctgaccctgcgcgggcagacgcgccctttgctccaggtccggacctgggcgctgctatagcaacgtcctggacgcccagaccttaggccgccgccgccgcggaagcgaggaacccggccttctcccgctcctgagggctgtggcggcggcggcccgggaggcggcccaggctgggtaaagaccgcccggctcctcctatgcaagctgaggcagcggattggttttcaagcatgcccttccagaagcatgtctactacccgctcgccagcggcccagaggggcccgacgtcgctgtggccgccgccgccgcgggtgcggcctccatggcctgtgcgccccccagcgcggcttcggggcccctgcccttcttccagttcaggccgcggctggagagtgtggactggcggcggctgagcgccatcgacgtggacaaggtggcgggggctgtggacgtgctgacgctgcaggagaacatcatgaacatcaccttctgcaagctggaagacgagaagtgcccacactgccagtcgggggtggacccggtgctgctgaagctcatccgtctggcgcagttcaccatcgagtacttgctgcactcacaagagttcctcacctcgcagctgcacaccctggaggagcggctgcgcctgagccactgcgacggcgagcagagcaagaagctgctcaccaagcaggcgggggagatcaagacgctcaaggaagagtgcaaacgccggaagaagatgatctccacccagcagctgatgatcgaggccaaagccaactattaccagtgccatttttgtgacaaggcctttatgaaccaagcttttctacaaagtcacattcaacgccgccacactgaagaaaattctcattttgagtatcagaaaaatgcacagattgagaagctccggagtgagatcgtcgtattgaaggaagagctgcagctcaccaggtctgagctagaggctgcacaccatgccagtgcagtcagattctccaaggaatatgaaatgcagaaaacaaaagaggaagactttttgaagttatttgacaggtggaaagaagaagaaaaggagaaactagttgatgaaatggaaaaagtcaaggagatgtttatgaaggaatttaaagaattaacttcgaagaattcagcattagaatatcaactgtcagaaatccagaagtccaatatgcagatcaagtccaacataggcacattaaaagatgcacacgagtttaaagaagaccgttctccatatccccaggatttccataatgtcatgcagcttcttgatagtcaggaaagcaaatggacagctcgagttcaagctattcatcaagaacacaagaaagagaagggtcggctcctgtcacatatagagaaacttcgaacctcaatgatagatgatctaaatgcaagcaatgttttctataagaaaaggatagaagagctagggcagagactccaggagcagaatgagctgattataactcagagacagcagattaaagactttacctgtaatccattaaacagtatcagtgaacccaaagtgaatgccccagccctgcacactttggaaactaaatcaagtctgccaatggtgcatgaacaggcattctcgtcgcacatactggaaccaatagaagaactttcagaggaagaaaaaggaagggaaaatgaacagaaattaaataacaacaaaatgcatttaaggaaagctttgaagagtaactcctccctcactaagggactaagaacaatggtggagcagaacttgatggagaaactggaaaccttggggattaatgcagatatacgtggcatttcaagtgatcagttgcatagagtactaaaaagtgtggaatcagaaagacataagcaagaaagagaaatacctaactttcatcaaattcgagaattccttgaacatcaagtcagctgtaaaattgaggagaaagcactactctcttcagatcagtgcagtgtttctcaaatggataccctttcaactggagaagtacccaaaatgatacaacttccttccaaaaacagacaactgattagacaaaaagctgtttctactgataggacatctgttccaaaaattaagaaaaatgtcatggaagatccttttcccagaaagtcttcaactattacgacccctccttttagttcagaggaggagcaggaggacgacgacctcatccgggcatacgcatccccaggcccacttcctgtgccgccaccacaaaacaagggcagcttcgggaagaacacagtgaaaagtgacgcggacgggaccgagggaagcgaaatcgaggacactgatgattctcccaagcccgcaggagtcgccgttaaaacacctactgaaaaagttgaaaagatgtttccacatcgcaaaaatgtgaacaaaccagtcggtggaactaatgtccctgagatgtttatcaaaaaagaagaattacaagaactaaagtgtgcggatgtggaggatgaagactgggacatatcatccctagaggaagagatatctttgggaaaaaaatctgggaaagaacagaaggaacctccacctgcgaaaaatgaaccacattttgctcatgtgctaaatgcctggggcgcatttaatcctaaggggccaaagggagaaggacttcaagaaaatgaatcaagcacattaaaaagcagcttagtaactgtgactgattggagcgacacttcagatgtctaattccacatgtcagaagattattccagaagccagcagtatttcagtatcacagtgtttcagtaatttgcctccatgattctagtgcttctgccttaccgtgtttcccacagcaacacagagactgattcaaagaacaatggtctctttaatggcacccaatacagtattgaaaatcagatcatcaacagtatttcgaagcatgtaaaggtgtttaagacttccgctgctgcttaaaaataacatgtcattgaagtcataaaaagttttttcttcagaaaggtactctagtgttaagtgtatttttttcaactaattttttagtgaattttttttaaacttacagcatgttttggtttgaattactaaaactttaaaaaatatttttcttatgtatgctgtcgtatcgtaggcgtttatattataaaattctgttagtagtcttaaaattgaattggtggaaccactaatccttaaaagttagtctggttatttttcatatagaagtaagtttaatccgagtgtggtggtgttcacctttaatcccagctacttgggaggctgaggtgggaggataacttgagcacaggagttcaagaccagcgtgggcaatatagcaagactccacccctccacaccccaaaaaagtaagtttaggattagaatatagctaggtccaatgttaaatacattttcctggagtacatttgtcacattcagctttgagccactgtaagcatgttactattaaatggttggttattttatatagcatattctttatcttggatattttatgaataaagtatagttattttaagtgccaattaatttatcagactaaatagaaaatatttgagccattactgaattcacatatgtatgtttttttttactatttaaaatacccaacatgtattatgaaatacctcaaaagtaatttagttacattcttaaacaatgacattgtcgaaagaaagttcttataagctgttttttgcatttttataacttggttatactatattctgtttccaagtaaccttttaactaaaagatttgttgggttttagatctcttttcatttgtcaaccttttcagtaaagccctctgttacatc

SEQ ID NO: 1202 - DNA, 1903 bp, human
gggcaacggaggggaaataaaagggaacggctccgaatctgccccagcggccgctgcgagacctcggcgccgacatcgcgacagcgaagcgctttgcacgccaggaaggtcccctctatgtgctgctgagccggtcctggacgcgacgagcccgccctcggtcttcggagcagaattcgcaaaaacggaaggactggaaatggcagaccatatgatggcaatgaaccacgggcgcttccccgacggcaccaatgggctgcaccatcaccctgcccaccgcatgggcatggggcagttcccgagcccccatcaccaccagcagcagcagccccagcacgccttcaacgccctaatgggcgagcacatacactacggcgcgggcaacatgaatgccacgagcggcatcaggcatgcgatggggccggggactgtgaacggagggcaccccccgagcgcgctggcccccgcggccaggtttaacaactcccagttcatgggtcccccggtggccagccagggaggctccctgccggccagcatgcagctgcagaagctcaacaaccagtatttcaaccatcacccctacccccacaaccactacatgccggatttgcaccctgctgcaggccaccagatgaacgggacaaaccagcacttccgagattgcaaccccaagcacagcggcggcagcagcacccccggcggctcgggcggcagcagcacccccggcggctctggcagcagctcgggcggcggcgcgggcagcagcaacagcggcggcggcagcggcagcggcaacatgcccgcctccgtggcccacgtccccgctgcaatgctgccgcccaatgtcatagacactgatttcatcgacgaggaagttcttatgtccttggtgatagaaatgggtttggaccgcatcaaggagctgcccgaactctggctggggcaaaacgagtttgattttatgacggacttcgtgtgcaaacagcagcccagcagagtgagctgttgactcgatcgaaaccccggcgaaagaaatcaaacccccaacttcttcggcgtgaattaaaagaaacattcccttagacacagtatctcacttttcagatcttgaaaggtttgagaacttggaaacaaagtaaactataaacttgtacaaattggttttaaaaaaaattgctgccactttttttcctgtttttgtttcgtttttgtagccttgacattcacccacctcccttatgtagttgaaatatctagctaacttggtctttttcgttgtttgtttttactcctttccctcactttctccagtgctcaactgttagatattaatcttggcaaactgcttaatcttgtggattttgtagatggtttcaaatgactgaactgcattcagatttacgagtgaaaggaaaaattgcattagttggttgcatgaacttcgaagggcagatattactgcacaaactgccatctcgcttcatttttttaactatgcatttgagtacagactaatttttaaaatatgctaaactggaagattaaacagatgtgggccaaactgttctggatcaggaaagtcatactgttcactttcaagttggctgtcccccccgccgccccccccacccccatatgtacagatgataatagggtgtggaatgtcgtcagtggcaaacatttcacagatttttattttgtttctgtcttcaacatttttgacactgtgctaatagttatattcagtacatgaaaagatactactgtgttgaaagctttttaggaaattttgacagtatttttgtacaaaacatttttttgaaaaaatacttgttaatttattctattttaatttgccaatgtcaataaaaagttaagaaaaaaaaaaaaaaaaaaaaaa

SEQ ID NO: 1203 - DNA, 1303 bp, human
ggcttctgggagcgaccgctccgctcgtctcgttggttccggaggtcgctgcggcggtgggaaatgctggcgcgcgcggcgcggggcactggggcccttttgctgaggggctctctactggcttctggccgcgctccgcgccgcgcctcctctggattgccccgaaacaccgtggtactgttcgtgccgcagcaggaggcctgggtggtggagcgaatgggccgattccaccggatcctggagcctggtttgaacatcctcatccctgtgttagaccggatccgatatgtgcagagtctcaaggaaattgtcatcaacgtgcctgagcagtcggctgtgactctcgacaatgtaactctgcaaatcgatggagtcctttacctgcgcatcatggacccttacaaggcaagctacggtgtggaggaccctgagtatgccgtcacccagctagctcaaacaaccatgagatcagagctcggcaaactctctctggacaaagtcttccgggaacgggagtccctgaatgccagcattgtggatgccatcaaccaagctgctgactgctggggtatccgctgcctccgttatgagatcaaggatatccatgtgccaccccgggtgaaagagtctatgcagatgcaggtggaggcagagcggcggaaacgggccacagttctagagtctgaggggacccgagagtcggccatcaatgtggcagaagggaagaaacaggcccagatcctggcctccgaagcagaaaaggctgaacagataaatcaggcagcaggagaggccagtgcagttctggcgaaggccaaggctaaagctgaagctattcgaatcctggctgcagctctgacacaacataatggagatgcagcagcttcactgactgtggccgagcagtatgtcagcgcgttctccaaactggccaaggactccaacactatcctactgccctccaaccctggcgatgtcaccagcatggtggctcaggccatgggtgtatatggagccctcaccaaagccccagtgccagggactccagactcactctccagtgggagcagcagagatgtccagggtacagatgcaagtcttgatgaggaacttgatcgagtcaagatgagttagtggagctgggcttggccagggagtctggggacaaggaagcagattttcctgattctggctctagcttccctgccaagattttggtttttatttttttatttgaactttagtcgtgtaataaactcaccagtggcaaacctgaaaaaaaaaaaaaaaaaaaaaaaaaaaa

SEQ ID NO: 1204 - DNA, 1513 bp, human
gtgcatttgtgttgtgggggcatggggtgcatttgtgtgtatatatgtgtggatgtagggtgcgtttgtctgtgtgtatttgtgtgggcatggagtgcatttgcgttgcgggggtgtggagtgtgtttgtgtgtgtgcacacgcacatggttctcatggtcctcccgttttcaactgaacctgtaattagctcctcagagaccaggtttcaagacaacagatgaattgtgaaagagagcagctaaggggtaatcaggaagcagccgctgcccctgacacaatggctcagccttacgcttcggcccagtttgctcccccgcagaacggtatccccgcggaatacacggcccctcatccccaccccgcgccagagtacacaggccagaccacggttcccgagcacacattaaacctgtaccctcccgcccagacgcactccgagcagagcccggcggacacgagcgctcagaccgtctctggcaccgccacacaggcagatgacgcagcaccgacggatggccagccccagacacaaccttctgaaaacacggaaaacaagtctcagcccaagcggctgcatgtctccaatatccccttcaggttccgggatccggacctcagacaaatgtttggtcaatttggtaaaatcttagatgttgaaattatttttaatgagcgaggctcaaagggatttggtttcgtaactttcgaaaatagtgccgatgcggacagggcgagggagaaattacacggcaccgtggtagagggccgtaaaatcgaggtaaataatgccacagcacgtgtaatgacaaataaaaagaccgtcaacccttatacaaatggctggaaattgaatccagttgtgggtgcagtctacagtcccgaattctatgcaggcacggtcctgttgtgccaggccaaccaggagggatcttccatgtacagtgcccccagttcacttgtatatacttctgcaatgccaggcttcccgtatccagcagccaccgccgcggccgcctaccgaggggcgcacctgcgaggccgcggtcgcaccgtgtacaacaccttcagggccgcggcgcccccgcccccgatcccggcctacggcggtgttgtttaccaggatggattttatggtgcagacatttatggtggttatgctgcataccgctacgcccagcctacccctgccactgccgctgcctacagtgacagttacggacgagtttatgctgccgacccctaccaccacgcacttgctccagcccccacctacggcgttggtgccatgaatgcttttgcacctttgactgatgccaagactaggagccatgctgatgatgtgggtctcgttctttcttcattgcaggctagtatataccgagggggatacaaccgttttgctccatactaaatgacaaaaccataaaaaccttccaatgtggggagaaaggaagctttccgaggcctgagtattgcaatacatgcagtagtacatcattttagcaactct

SEQ ID NO: 1205 - DNA, 472 bp, human
atggggcggaagattctggggacacagaggatgagctgaggagggtggcagagcagaaggaacacagactgccccctggccaggaggagaatggggaagacccgtatgcaggctccacggatgagaacacggacagtgaggaacaccaggagcctcctgatctgccagtccctgagctcccagatttcttccagggcaagcacttctttctttacggggagttccctggggacgagcggcggaaactcatccgatacgtcacagccttcaatggggagctcgaggactatatgagtgaccgggttcagtttgtgatcacagcacaggaatgggatcccagctttgaggaggccctgatggacaacccctccctggcattcgttcgtccccgatggatctacagttgcaatgagaagcagaagttacttcctcaccagctctatggggtggtgccgcaagcctgaagtatgtg

SEQ ID NO: 1206 - DNA, 472 bp, human; identical to SEQ ID NO: 1187

SEQ ID NO: 1207 - DNA, 4002 bp, human
ggggccttcaagaagagagttctcagagcagactcagctttaggtgctgaaatgaatttctcaagatcatcactccattcagaaggctaatgctgtgtgctgagaacagaaaggagatggaggattggatcagctcactgaagtctgtacagaccagagaaccctacgaggtggcccagtttaatgtggaacatttctcagggatgcacaactggtacgcctgctcccacgcccgacccaccttctgtaacgtgtgcagagagagtctttctggagtcacctcccatggcctgtcctgcgaagtgtgtaaattcaaggctcacaaaagatgtgcagtgagagcaacaaataactgtaaatggactaccctggcctccatcgggaaggacattatagaagatgaagatggcgtcgcgatgcctcaccagtggcttgagggcaacctgcctgtaagtgccaagtgtgctgtctgcgacaaaacatgtggcagtgttctccgtctacaggattggaaatgcctttggtgtaagacaatggtacacactgcctgcaaagatttataccatccaatatgtccacttggtcaatgtaaagtatctatcatacctccaattgcactaaacagcaccgattccgatggtttctgtagagcaacattttcgttctgtgttagtcctctattggtttttgtcaattctaagagtggagataatcagggagtaaagttcctccgtcgctttaaacagttgctaaatccggctcaggtgtttgatttaatgaatggaggtcctcatttaggtttaagattatttcagaagtttgacaatttccggattcttgtttgtggaggcgatggaagtgtaggttgggttttgtcagaaatcgataagctcaacttgaataaacagtgtcagctgggagtgttgcctttgggtacaggaaatgaccttgcacgagttcttggctggggaggttcatatgacgatgacacccaacttcctcagatcctagagaaactggaacgagccagtaccaaaatgttggacaggtggagtataatgacatatgaactcaaattgccaccaaaagcttccctacttccaggacctccagaagcatctgaagaattttatatgacgatttatgaagactcagttgcaacgcatcttacaaaaatcctcaattctgatgaacatgcagtggtcatatcttctgccaagacgctatgtgaaactgtaaaggacttcgttgccaaagtagaaaagacgtatgacaaaaccttggaaaatgccgttgtagctgatgccgtggccagtaaatgttcagtcctaaacgagaagctcgaacaactgctgcaggctttgcacacagattcccaggctgcgcctgttctccctggcctcagccctctcattgtggaagaagatgctgtggaatcgtccagtgaagagtccctgggtgaaagcaaagagcagcttggggatgacgttacaaaaccttcctcccagaaagccgtcaaaccaagggaaatcatgttgcgggcaaatagtttaaagaaagcagtgaggcaagtcattgaggaagccggaaaagttatggatgacccgacagttcacccgtgtgaaccagctaatcagtcctctgattatgacagcacagaaacagatgaatctaaggaggaagctaaagatgatggtgccaaagaatcaataactgttaaaactgcacctcggtctccagatgcccgggcaagttatggccattcccaaactgattctgtccctggtccagctgtggcagccagcaaagaaaacctccctgtgctcaataccagaataatctgcccaggtttaagagcaggactggctgcctcaattgctgggagttcgattatcaacaaaatgttactggcaaacattgatccttttggtgccacgccgtttattgacccggatctagattccgtagatggatattcagaaaaatgtgtcatgaacaattactttgggattggattagatgcaaaaatttcattagaatttaataataaaagagaggagcaccctgaaaaatgcaggagccgaactaaaaacttgatgtggtatggagtccttggaacccgggagttattacagagatcgtacaagaatttagaacaaagggttcaacttgagtgtgatgggcagtatattcctcttcccagcttgcaaggcatagccgtgttgaacattcccagctatgctggaggcactaacttttggggtggaactaaagaggatgatatatttgctgcaccatcctttgatgacaagatcctggaagttgtagcaatatttgatagcatgcaaatggcagtttcaagggtcattaaactgcagcatcatcgaatagcccagtgccgtacagtgaaaatcactatatttggtgacgaaggagtcccagtgcaagtggatggtgaagcgtgggttcagcctccagggattatcaaaattgtgcacaaaaacagagcacaaatgctaacaagggacagagcctttgagagcactctgaaatcttgggaagataagcagaagtgtgattctggtaaaccagttctccgaacccatttgtacatccatcacgccattgacttggcaacagaagaggtgtcgcagatgcagctatgctcccaggctgcagaggagctcattactaggatatgtgacgcagccacaattcactgtcttttggagcaagaactggcccatgctgtgaatgcctgctcccatgccctgaataaagccaacccaaggtgcccggagagtcttacaagagacactgccactgaaatagccatcaatgtgaaggcgctgtataatgaaacagaatctttgctagttggcagggttcctttgcagctggaatcgccacatgaagagcgagtatccaatgccttacactctgtggaggtggaattacagaaactgacagagattccttggctttattatatcttacacccaaatgaggatgaggaacctcctatggattgcaccaaaaggaacaacagaagcaccgtatttcgaatagtgccaaagtttaaaaaggaaaaggttcagaagcagaagacaagttcacagcctgttcagaaatggggcacagaggaagttgctgcttggctggatctgctcaatttgggagagtacaaagatatcttcatccgtcatgacatcagaggggctgaacttttgcatctggaaaggcgagatcttaagaacacagtaggagaaaaaagagacaccaaagaaaatggtaaacatatggatctggggataccgaaagtgggtcatgtgaagcgaattctccagggaattaaagagcttggaaggagcactccacagtcggaggtgtaatcatattggtgctatttcttggaagagaagttattgccacttaatacaaagtccttggaagcaagtggctgttcttgtagttttctgcatagataagtaagcaccactgaagcacctctgtggcttgatattttgctgtgggtgaaattttgatttgaggtattagaaaatatttttgtgccgaacaatacattccacaaagccattttctttttgtgcaaacctgacatgttcaaatatattcacaatggtaataaggtaggaggaatctgagacgattgcattgtctaaacagtggaattgcaaaatgtttactttccatagatctggtctgatggaatgttcctactgtgcaactgcataacaatatgtggttaaaacttcctaggtttcattacgggggggcattggccattttcttaaaatcataggttaggagactaaaatataaattaagttgtgatttgaatgtagattggtatcacctccaactcctagtgcttagtggtcaaatatgttgaaaacctttccaatactatgaatgaatgcaaatcttaatgcacgaaaaaaaaaaaaaaaaaaaaaaaaaaaaagaaaaaaaaaaaaaaaa

SEQ ID NO: 1208 - protein, 274 aa, human
MGTDSRAAKALLARARTLHLQTGNLLNWGRLRKKCPSTHSEELHDCIQKTLNEWSSQINPDLVREFPDVLECTVSHAVEKINPDEREEMKVSAKLFIVESNSSSSTRSAVDMACSVLGVAQLDSVIIASPPIEDGVNLSLEHLQPYWEELENLVQSKKIVAIGTSDLDKTQLEQLYQWAQVKPNSNQVNLASCCVMPPDLTAFAKQFDIQLLTHNDPKELLSEASFQEALQESIPDIQAHEWVPLWLLRYSVIVKSRGIIKSKGYILQAKRRGS

SEQ ID NO: 1209 - protein, 196 aa, human
MPEPAKSAPAPKKGSKKAVTKAQKKDGKKRKRSRKESYSVYVYKVLKQVHPDTGISSKAMGIMNSFVNDIMPEPAKSAPAPKKGSKKAVTKAQKKDGKKRKRSRKESYSVYVYKVLKQVHPDTGISSKAMGIMNSFVNDIFERIAGEASRLAHYNKRSTITSREIQTAVRLLLPGELAKHAVSEGTKAVTKYTSSK

SEQ ID NO: 1210 - protein, 991 aa, human
MKTCWKIPVFFFVCSFLEPWASAAVKRRPRFPVNSNSNGGNELCPKIRIGQDDLPGFDLISQFQVDKAASMKTCWKIPVFFFVCSFLEPWASAAVKRRPRFPVNSNSNGGNELCPKIRIGQDDLPGFDLISQFQVDKAASRRAIQRVVGSATLQVAYKLGNNVDFRIPTRNLYPSGLPEEYSFLTTFRMTGSTLKKNWNIWQIQDSSGKEQVGIKINGQTQSVVFSYKGLDGSLQTAAFSNLSSLFDSQWHKIMIGVERSSATLFVDCNRIESLPIKPRGPIDIDGFAVLGKLADNPQVSVPFELQWMLIHCDPLRPRRETCHELPARITPSQTTDERGPPGEQGPPGASGPPGVPGIDGIDGDRGPKGPPGPPGPAGEPGKPGAPGKPGTPGADGLTGPDGSPGSIGSKGQKGEPGVPGSRGFPGRGIPGPPGPPGTAGLPGELGRVGPVGDPGRRGPPGPPGPPGPRGTIGFHDGDPLCPNACPPGRSGYPGLPGMRGHKGAKGEIGEPGRQGHKGEEGDQGELGEVGAQGPPGAQGLRGITGIVGDKGEKGARGLDGEPGPQGLPGAPGDQGQRGPPGEAGPKGDRGAEGARGIPGLPGPKGDTGLPGVDGRDGIPGMPGTKGEPGKPGPPGDAGLQGLPGVPGIPGAKGVAGEKGSTGAPGKPGQMGNSGKPGQQGPPGEVGPRGPQGLPGSRGELGPVGSPGLPGKLGSLGSPGLPGLPGPPGLPGMKGDRGVVGEPGPKGEQGASGEEGEAGERGELGDIGLPGPKGSAGNPGEPGLRGPEGSRGLPGVEGPRGPPGPRGVQGEQGATGLPGVQGPPGRAPTDQHIKQVCMRVIQEHFAEMAASLKRPDSGATGLPGRPGPPGPPGPPGENGFPGQMGIRGLPGIKGPPGALGLRGPKGDLGEKGERGPPGRGPNGLPGAIGLPGDPGPASYGKNGRDGERGPPGLAGIPGVPGPPGPPGLPGFCEPASCTMQAGQRAFNKGPDP

SEQ ID NO: 1211 - protein, 1935 aa, human; identical to SEQ ID NO: 633

SEQ ID NO: 1212 - protein, 272 aa, human
MSCVPWKGDKAKSESLELPQAAPPQIYHEKQRRELCALHALNNVFQDSNAFTRDTLQEIFQRLSPNTMVTMSCVPWKGDKAKSESLELPQAAPPQIYHEKQRRELCALHALNNVFQDSNAFTRDTLQEIFQRLSPNTMVTPHKKSMLGNGNYDVNVIMAALQTKGYEAVWWDKRRDVGVIALTNVMGFIMNLPSSLCWGPLKLPLKRQHWICVREVGGAYYNLDSKLKMPEWIGGESELRKFLKHHLRGKNCELLLVVPEEVEAHQSWRTDV

SEQ ID NO: 1213 - protein, 152 aa, human
MANCERTFIAIKPDGVQRGLVGEIIKRFEQKGFRLVGLKFMQASEDLLKEHYVDLKDRPFFAGLVKYMHSGPVVAMVWEGLNVVKTGRVMLGETNPADSKPGTIRGDFCIQVGRNIIHGSDSVESAEKEIGLWFHPEELVDYTSCAQNWIYE

SEQ ID NO: 1214 - protein, 275 aa, human
MTERRVPFSLLRGPSWDPFRDWYPHSRLFDQAFGLPRLPEEWSQWLGGSSWPGYVRPLPPAAIESPAVAAMTERRVPFSLLRGPSWDPFRDWYPHSRLFDQAFGLPRLPEEWSQWLGGSSWPGYVRPLPPAAIESPAVAAPAYSRALSRQLSSGVSEIRHTADRWRVSLDVNHFAPDELTVKTKDGVVEITGKHEERQDEHGYISRCFTRKYTLPPGVDPTQVSSSLSPEGTLTVEAPMPKLATQSNEITIPVTFESRAQLGGPEAAKSDETAAK

SEQ ID NO: 1215 - protein, 534 aa, human
MPKKAKPTGSGKEEGPAPCKQMKLEAAGGPSALNFDSPSSLFESLISPIKTETFFKEFWEQKPLLIQRDDMPKKAKPTGSGKEEGPAPCKQMKLEAAGGPSALNFDSPSSLFESLISPIKTETFFKEFWEQKPLLIQRDDPALATYYGSLFKLTDLKSLCSRGMYYGRDVNVCRCVNGKKKVLNKDGKAHFLQLRKDFDQKRATIQFHQPQRFKDELWRIQEKLECYFSSLVGSNVYITPAGSQGLPPHYDDVEVFILQLEGEKHWRLYHPTVPLAREYSVEAEERIGRPVHEFMLKPGDLLYFPRGTIHQADTPAGLAHSTHVTISTYQNNSWGDFLLDTISGLVFDTAKEDVELRTGIPRQLLLVESTTVATRRLSGFLRTLADRLEGTKELLSSDMKKDFIMHRLPPYSAGDGAELSTPGGKLPRLDSVVRLQFKDHIVLTVLPDQDQSDETQEKMVYIYHSLKNSRETHMMGNEEETEFHGLRFPLSHLDALKQIWNSPAISVKDLKLTTDEEKESLVLSLWTECLIQVV

SEQ ID NO: 1216 - protein, 453 aa, human
MSTRESFNPESYELDKSFRLTRFTELKGTGCKVPQDVLQKLLESLQENHFQEDEQFLGAVMPRLGIGMDTMSTRESFNPESYELDKSFRLTRFTELKGTGCKVPQDVLQKLLESLQENHFQEDEQFLGAVMPRLGIGMDTCVIPLRHGGLSLVQTTDYIYPIVDDPYMMGRIACANVLSDLYAMGVTECDNMLMLLGVSNKMTDRERDKVMPLIIQGFKDAAEEAGTSVTGGQTVLNPWIVLGGVATTVCQPNEFIMPDNAVPGDVLVLTKPLGTQVAVAVHQWLDIPEKWNKIKLVVTQEDVELAYQEAMMNMARLNRTAAGLMHTFNTHAATDITGFGILGHAQNLAKQQRNEVSFVIHNLPVLAKMAAVSKACGNMFGLMHGTCPETSGGLLICLPREQAARFCAEIKSPKYGEGHQAWIIGIVEKGNRTARIIDKPRIIEVAHKWPLKT

SEQ ID NO: 1217 - protein, 560 aa, human
MECLYYFLGFLLLAARLPLDAAKRFHDVLGNERPSAYMREHNQLNGWSSDENDWNEKLYPVWKRGDMRWKNSWKGGRVQAVLTSDSPALVGSNITFAVNLIFPRCQKEDANGNIVYEKNCRNEAGLSADPYVYNWTAWSEDSDGENGTGQSHHNVFPDGKPFPHHPGWRRWNFIYVFHTLGQYFQKLGRCSVRVSVNTANVTLGPQLMEVTVYRRHGRAYVPIAQVKDVYVVTDQIPVFVTMFQKNDRNSSDETFLKDLPIMFDVLIHDPSHFLNYSTINYKWSFGDNTGLFVSTNHTVNHTYVLNGTFSLNLTVKAAAPGPCPPPPPPPRPSKPTPSLGPAGDNPLELSRIPDENCQINRYGHFQATITIVEGILEVNIIQMTDVLMPVPWPESSLIDFVVTCQGSIPTEVCTIISDPTCEITQNTVCSPVDVDEMCLLTVRRTFNGSGTYCVNLTLGDDTSLALTSTLISVPDRDPASPLRMANSALISVGCLAIFVTVISLLVYKKHKEYNPIENSPGNVVRSKGLSVFLNRAKAVFFPGNQEKDPLLKNQEFKGVS

SEQ ID NO: 1218 - protein, 223 aa, human
MNVGVAHSEVNPNTRVMNSRGIWLAYIILVGLLHMVLLSIPFFSIPVVWTLTNVIHNLATYVFLHTVKGTMNVGVAHSEVNPNTRVMNSRGIWLAYIILVGLLHMVLLSIPFFSIPVVWTLTNVIHNLATYVFLHTVKGTPFETPDQGKARLLTHWEQMDYGLQFTSSRKFLSISPIVLYLLASFYTKYDAAHFLINTASLLSVLLPKLPQFHGVRVFGINKY

SEQ ID NO: 1219 - protein, 654 aa, human
MKLSLVAAMLLLLSAARAEEEDKKEDVGTVVGIDLGTTYSCVGVFKNGRVEIIANDQGNRITPSYVAFTPEGERLIGDAAKNQLTSNPENTVFDAKRLIGRTWNDPSVQQDIKFLPFKVVEKKTKPYIQVDIGGGQTKTFAPEEISAMVLTKMKETAEAYLGKKVTHAVVTVPAYFNDAQRQATKDAGTIAGLNVMRIINEPTAAAIAYGLDKREGEKNILVFDLGGGTFDVSLLTIDNGVFEVVATNGDTHLGGEDFDQRVMEHFIKLYKKKTGKDVRKDNRAVQKLRREVEKAKRALSSQHQARIEIESFYEGEDFSETLTRAKFEELNMDLFRSTMKPVQKVLEDSDLKKSDIDEIVLVGGSTRIPKIQQLVKEFFNGKEPSRGINPDEAVAYGAAVQAGVLSGDQDTGDLVLLDVCPLTLGIETVGGVMTKLIPRNTVVPTKKSQIFSTASDNQPTVTIKVYEGERPLTKDNHLLGTFDLTGIPPAPRGVPQIEVTFEIDVNGILRVTAEDKGTGNKNKITITNDQNRLTPEEIERMVNDAEKFAEEDKKLKERIDTRNELESYAYSLKNQIGDKEKLGGKLSSEDKETMEKAVEEKIEWLESHQDADIEDFKAKKKELEEIVQPIISKLYGSAGPPPTGEEDTAEKDEL

SEQ ID NO: 1220 - protein, 476 aa, human
MLFHSLSGPEVHGVIDEMDRRAKSEAPAISSAIDRGDTETTMPSISSDRAALCAGCGGKISDRYYLLAVDMLFHSLSGPEVHGVIDEMDRRAKSEAPAISSAIDRGDTETTMPSISSDRAALCAGCGGKISDRYYLLAVDKQWHMRCLKCCECKLNLESELTCFSKDGSIYCKEDYYRRFSVQRCARCHLGISASEMVMRARDLVYHLNCFTCTTCNKMLTTGDHFGMKDSLVYCRLHFEALLQGEYPAHFNHADVAAAAAAAAAAKSAGLGAAGANPLGLPYYNGVGTVQKGRPRKRKSPGPGADLAAYNAALSCNENDAEHLDRDQPYPSSQKTKRMRTSFKHHQLRTMKSYFAINHNPDAKDLKQLAQKTGLTKRVLQVWFQNARAKFRRNLLRQENTGVDKSTDAALQTGTPSGPASELSNASLSPSSTPTTLTDLTSPTLPTVTSVLTSVPGNLEGHEPHSPSQTTLTNLF

SEQ ID NO: 1221 - protein, 244 aa, human
MSAAAYMDFVAAQCLVSISNRAAVPEHGVAPDAERLRLPEREVTKEHGDPGDTWKDYCTLVTIAKSLLDLNKYRPIQTPSVCSDSLESPDEDMGSDSDVTTESGSSPSHSPEERQDPGSAPSPLSLLHPGVAAKGKHASEKRHKCPYSGCGKVYGKSSHLKAHYRVHTGERPFPCTWPDCLKKFSRSDELTRHYRTHTGEKQFRCPLCEKRFMRSDHLTKHARRHTEFHPSMIKRSKKALANAL

SEQ ID NO: 1222 - protein, 707 aa, human
MSRDRFRSRGGGGGGFHRRGGGGGRGGLHDFRSPPPGMGLNQNRGPMGPGPGQSGPKPPIPPPPPHQQQQQPPPQQPPPQQPPPHQPPPHPQPHQQQQPPPPPQDSSKPVVAQGPGPAPGVGSAPPASSSAPPATPPTSGAPPGSGPGPTPTPPPAVTSAPPGAPPPTPPSSGVPTTPPQAGGPPPPPAAVPGPGPGPKQGPGPGGPKGGKMPGGPKPGGGPGLSTPGGHPKPPHRGGGEPRGGRQHHPPYHQQHHQGPPPGGPGGRSEEKISDSEGFKANLSLLRRPGEKTYTQRCRLFVGNLPADITEDEFKRLFAKYGEPGEVFINKGKGFGFIKLESRALAEIAKAELDDTPMRGRQLRVRFATHAAALSVRNLSPYVSNELLEEAFSQFGPIERAVVIVDDRGRSTGKGIVEFASKPAARKAFERCSEGVFLLTTTPRPVIVEPLEQLDDEDGLPEKLAQKNPMYQKERETPPRFAQHGTFEYEYSQRWKSLDEMEKQQREQVEKNMKDAKDKLESEMEDAYHEHQANLLRQDLMRRQEELRRMEELHNQEMQKRKEMQLRQEEERRRREEEMMIRQREMEEQMRRQREESYSRMGYMDPRERDMRMGGGGAMNMGDPYGSGGQKFPPLGGGGGIGYEANPGVPPATMSGSMMGSDMRTERFGQGGAGPVGGQGPRGMGPGTPAGYGRGREEYEGPNKKPRF

SEQ ID NO: 1223 - protein, 321 aa, human
MAHRLQIRLLTWDVKDTLLRLRHPLGEAYATKARAHGLEVEPSALEQGFRQAYRAQSHSFPNYGLSHGLTMAHRLQIRLLTWDVKDTLLRLRHPLGEAYATKARAHGLEVEPSALEQGFRQAYRAQSHSFPNYGLSHGLTSRQWWLDVVLQTFHLAGVQDAQAVAPIAEQLYKDFSHPCTWQVLDGAEDTLRECRTRGLRLAVISNFDRRLEGILGGLGLREHFDFVLTSEAAGWPKPDPRIFQEALRLAHMEPVVAAHVGDNYLCDYQGPRAVGMHSFLVVGPQALDPVVRDSVPKEHILPSLAHLLPALDCLEGSTPGL

SEQ ID NO: 1224 - protein, 363 aa, human
MGFPAAALLCALCCGLLAPAARAGYSEERCSWRGSGLTQEPGSVGQLALACAEGAVEWLYPAGALRLTLGMGFPAAALLCALCCGLLAPAARAGYSEERCSWRGSGLTQEPGSVGQLALACAEGAVEWLYPAGALRLTLGGPDPRARPGIACLRPVRPFAGAQVFAERAGGALELLLAEGPGPAGGRCVRWGPRERRALFLQATPHQDISRRVAAFRFELREDGRPELPPQAHGLGVDGACRPCSDAELLLAACTSDFVIHGIIHGVTHDVELQESVITVVAARVLRQTPPLFQAGRSGDQGLTSIRTPLRCGVHPGPGTFLFMGWSRFGEARLGCAPRFQEFRRAYEAARAAHLHPCEVALH

SEQ ID NO: 1225 - protein, 391 aa, human
MVMFKKIKSFEVVFNDPEKVYGSGERVAGRVIVEVCEVTRVKAVRILACGVAKVLWMQGSQQCKQTSEYLRYEDTLLLEDQPTGENEMVIMRPGNKYEYKFGFELPQGPLGTSFKGKYGCVDYWVKAFLDRPSQPTQETKKNFEVVDLVDVNTPDLMAPVSAKKEKKVSCMFIPDGRVSVSARIDRKGFCEGDEISIHADFENTCSRIVVPKAAIVARHTYLANGQTKVLTQKLSSVRGNHIISGTCASWRGKSLRVQKIRPSILGCNILRVEYSLLIYVSVPGSKKVILDLPLVIGSRSGLSSRTSSMASRTSSEMSWVDLNIPDTPEAPPCYMDVIPEDHRLESPTTPLLDDMDGSQDSPIFMYAPEFKFMPPPTYTEVDPCILNNNVQ

SEQ ID NO: 1226 - protein, 233 aa, human
MDALEGESFALSFSSASDAEFDAVVGYLEDIIMDDEFQLLQRNFMDKYYLEFEDTEENKLIYTPIFNEYIMDALEGESFALSFSSASDAEFDAVVGYLEDIIMDDEFQLLQRNFMDKYYLEFEDTEENKLIYTPIFNEYISLVEKYIEEQLLQRIPEFNMAAFTTTLQHHKDEVAGDIFDMLLTFTDFLAFKEMFLDYRAEKEGRGLDLSSGLVVTSLCKSSSLPASQNNLRH

SEQ ID NO: 1227 - protein, 182 aa, human
MAAALARLGLRPVKQVRVQFCPFEKNVESTRTFLQTVSSEKVRSTNLNCSVIADVRHDGSEPCVDVLFGDMAAALARLGLRPVKQVRVQFCPFEKNVESTRTFLQTVSSEKVRSTNLNCSVIADVRHDGSEPCVDVLFGDGHRLIMRGAHLTALEMLTAFASHIRARDAAGSGDKPGADTGR

SEQ ID NO: 1228 - protein, 391 aa, human
MRLPRRAALGLLPLLLLLPPAPEAAKKPTPCHRCRGLVDKFNQGMVDTAKKNFGGGNTAWEEKTLSKYESMRLPRRAALGLLPLLLLLPPAPEAAKKPTPCHRCRGLVDKFNQGMVDTAKKNFGGGNTAWEEKTLSKYESSEIRLLEILEGLCESSDFECNQMLEAQEEHLEAWWLQLKSEYPDLFEWFCVKTLKVCCSPGTYGPDCLACQGGSQRPCSGNGHCSGDGSRQGDGSCRCHMGYQGPLCTDCMDGYFSSLRNETHSICTACDESCKTCSGLTNRDCGECEVGWVLDEGACVDVDECAAEPPPCSAAQFCKNANGSYTCEDVDECSLAEKTCVRKNENCYNTPGSYVCVCPDGFEETEDACVPPAEAEATEGESPTQLPSREDL

SEQ ID NO: 1229 - protein, 541 aa, human
MPNSEPASLLELFNSIATQGELVRSLKAGNASKDEIDSAVKMLVSLKMSYKAAAGEDYKADCPPGNPAPTMPNSEPASLLELFNSIATQGELVRSLKAGNASKDEIDSAVKMLVSLKMSYKAAAGEDYKADCPPGNPAPTSNHGPDATEAEEDFVDPWTVQTSSAKGIDYDKLIVRFGSSKIDKELINRIERATGQRPHHFLRRGIFFSHRDMNQVLDAYENKKPFYLYTGRGPSSEAMHVGHLIPFIFTKWLQDVFNVPLVIQMTDDEKYLWKDLTLDQAYSYAVENAKDIIACGFDINKTFIFSDLDYMGMSSGFYKNVVKIQKHVTFNQVKGIFGFTDSDCIGKISFPAIQAAPSFSNSFPQIFRDRTDIQCLIPCAIDQDPYFRMTRDVAPRIGYPKPALLHSTFFPALQGAQTKMSASDPNSSIFLTDTAKQIKTKVNKHAFSGGRDTIEEHRQFGGNCDVDVSFMYLTFFLEDDDKLEQIRKDYTSGAMLTGELKKALIEVLQPLIAEHQARRKEVTDEIVKEFMTPRKLSFDFQ

SEQ ID NO: 1230 - protein, 918 aa, human
MQAEAADWFSSMPFQKHVYYPLASGPEGPDVAVAAAAAGAASMACAPPSAASGPLPFFQFRPRLESVDWRMQAEAADWFSSMPFQKHVYYPLASGPEGPDVAVAAAAAGAASMACAPPSAASGPLPFFQFRPRLESVDWRRLSAIDVDKVAGAVDVLTLQENIMNITFCKLEDEKCPHCQSGVDPVLLKLIRLAQFTIEYLLHSQEFLTSQLHTLEERLRLSHCDGEQSKKLLTKQAGEIKTLKEECKRRKKMISTQQLMIEAKANYYQCHFCDKAFMNQAFLQSHIQRRHTEENSHFEYQKNAQIEKLRSEIVVLKEELQLTRSELEAAHHASAVRFSKEYEMQKTKEEDFLKLFDRWKEEEKEKLVDEMEKVKEMFMKEFKELTSKNSALEYQLSEIQKSNMQIKSNIGTLKDAHEFKEDRSPYPQDFHNVMQLLDSQESKWTARVQAIHQEHKKEKGRLLSHIEKLRTSMIDDLNASNVFYKKRIEELGQRLQEQNELIITQRQQIKDFTCNPLNSISEPKVNAPALHTLETKSSLPMVHEQAFSSHILEPIEELSEEEKGRENEQKLNNNKMHLRKALKSNSSLTKGLRTMVEQNLMEKLETLGINADIRGISSDQLHRVLKSVESERHKQEREIPNFHQIREFLEHQVSCKIEEKALLSSDQCSVSQMDTLSTGEVPKMIQLPSKNRQLIRQKAVSTDRTSVPKIKKNVMEDPFPRKSSTITTPPFSSEEEQEDDDLIRAYASPGPLPVPPPQNKGSFGKNTVKSDADGTEGSEIEDTDDSPKPAGVAVKTPTEKVEKMFPHRKNVNKPVGGTNVPEMFIKKEELQELKCADVEDEDWDISSLEEEISLGKKSGKEQKEPPPAKNEPHFAHVLNAWGAFNPKGPKGEGLQENESSTLKSSLVTVTDWSDTSDV

SEQ ID NO: 1231 - protein, 270 aa, human
MADHMMAMNHGRFPDGTNGLHHHPAHRMGMGQFPSPHHHQQQQPQHAFNALMGEHIHYGAGNMNATSGIRHAMGPGTVNGGHPPSALAPAARFNNSQFMGPPVASQGGSLPASMQLQKLNNQYFNHHPYPHNHYMPDLHPAAGHQMNGTNQHFRDCNPKHSGGSSTPGGSGGSSTPGGSGSSSGGGAGSSNSGGGSGSGNMPASVAHVPAAMLPPNVIDTDFIDEEVLMSLVIEMGLDRIKELPELWLGQNEFDFMTDFVCKQQPSRVSC

SEQ ID NO: 1232 - protein, 426 aa, human
MLARAARGTGALLLRGSLLASGRAPRRASSGLPRNTVVLFVPQQEAWVVERMGRFHRILEPGLNILIPVLMLARAARGTGALLLRGSLLASGRAPRRASSGLPRNTVVLFVPQQEAWVVERMGRFHRILEPGLNILIPVLDRIRYVQSLKEIVINVPEQSAVTLDNVTLQIDGVLYLRIMDPYKASYGVEDPEYAVTQLAQTTMRSELGKLSLDKVFRERESLNASIVDAINQAADCWGIRCLRYEIKDIHVPPRVKESMQMQVEAERRKRATVLESEGTRESAINVAEGKKQAQILASEAEKAEQINQAAGEASAVLAKAKAKAEAIRILAAALTQHNGDAAASLTVAEQYVSAFSKLAKDSNTILLPSNPGDVTSMVAQAMGVYGALTKAPVPGTPDSLSSGSSRDVQGTDASLDEELDRVKMS

SEQ ID NO: 1233 - protein, 993 aa, human
MEGAKPTLQLVYQAVQALYHDPDPSGKERASFWLGELQRSVHAWEISDQLLQIRQDVESCYFAAQTMKMKMEGAKPTLQLVYQAVQALYHDPDPSGKERASFWLGELQRSVHAWEISDQLLQIRQDVESCYFAAQTMKMKIQTSFYELPTDSHASLRDSLLTHIQNLKDLSPVIVTQLALAIADLALQMPSWKGCVQTLVEKYSNDVTSLPFLLEILTVLPEEVHSRSLRIGANRRTEIIEDLAFYSSTVVSLLMTCVEKAGTDEKMLMKVFRCLGSWFNLGVLDSNFMANNKLLALLFEVLQQDKTSSNLHEAASDCVCSALYAIENVETNLPLAMQLFQGVLTLETAYHMAVAREDLDKVLNYCRIFTELCETFLEKIVCTPGQGLGDLRTLELLLICAGHPQYEVVEISFNFWYRLGEHLYKTNDEVIHGIFKAYIQRLLHALARHCQLEPDHEGVPEETDDFGEFRMRVSDLVKDLIFLIGSMECFAQLYSTLKEGNPPWEVTEAVLFIMAAIAKSVDPENNPTLVEVLEGVVRLPETVHTAVRYTSIELVGEMSEVVDRNPQFLDPVLGYLMKGLCEKPLASAAAKAIHNICSVCRDHMAQHFNGLLEIARSLDSFLLSPEAAVGLLKGTALVLARLPLDKITECLSELCSVQVMALKKLLSQEPSNGISSDPTVFLDRLAVIFRHTNPIVENGQTHPCQKVIQEIWPVLSETLNKHRADNRIVERCCRCLRFAVRCVGKGSAALLQPLVTQMVNVYHVHQHSCFLYLGSILVDEYGMEEGCRQGLLDMLQALCIPTFQLLEQQNGLQNHPDTVDDLFRLATRFIQRSPVTLLRSQVVIPILQWAIASTTLDHRDANCSVMRFLRDLIHTGVANDHEEDFELRKELIGQVMNQLGQQLVSQLLHTCCFCLPPYTLPDVAEVLWEIMQVDRPTFCRWLENSLKGLPKETTVGAVTVTHKQLTDFHKQVTSAEECKQVCWALRDFTRLFR

SEQ ID NO: 1234 - protein, 703 aa, human
MPEIRLRHVVSCSSQDSTHCAENLLKADTYRKWRAAKAGEKTISVVLQLEKEEQIHSVDIGNDGSAFVEVMPEIRLRHVVSCSSQDSTHCAENLLKADTYRKWRAAKAGEKTISVVLQLEKEEQIHSVDIGNDGSAFVEVLVGSSAGGAGEQDYEVLLVTSSFMSPSESRSGSNPNRVRMFGPDKLVRAAAEKRWDRVKIVCSQPYSKDSPFGLSFVRFHSPPDKDEAEAPSQKVTVTKLGQFRVKEEDESANSLRPGALFFSRINKTSPVTASDPAGPSYAAATLQASSAASSASPVSRAIGSTSKPQESPKGKRKLDLNQEEKKTPSKPPAQLSPSVPKRPKLPAPTRTPATAPVPARAQGAVTGKPRGEGTEPRRPRAGPEELGKILQGVVVVLSGFQNPFRSELRDKALELGAKYRPDWTRDSTHLICAFANTPKYSQVLGLGGRIVRKEWVLDCHRMRRRLPSRRYLMAGPGSSSEEDEASHSGGSGDEAPKLPQKQPQTKTKPTQAAGPSSPQKPPTPEETKAASPVLQEDIDIEGVQSEGQDNGAEDSGDTEDELRRVAEQKEHRLPPGQEENGEDPYAGSTDENTDSEEHQEPPDLPVPELPDFFQGKHFFLYGEFPGDERRKLIRYVTAFNGELEDYMSDRVQFVITAQEWDPSFEEALMDNPSLAFVRPRWIYSCNEKQKLLPHQLYGVVPQA

SEQ ID NO: 1235 - protein, 1954 aa, human
VAGCRRRGAGDPNMANLEESFPRGGTRKIHKPEKAFQQSVEQDNLFDISTEEGSTKRKKSQKGPAKTKKLVAGCRRRGAGDPNMANLEESFPRGGTRKIHKPEKAFQQSVEQDNLFDISTEEGSTKRKKSQKGPAKTKKLKIEKRESSKSAREKFEILSVESLCEGMRILGCVKEVNELELVISLPNGLQGFVQVTEICDAYTKKLNEQVTQEQPLKDLLHLPELFSPGMLVRCVVSSLGITDRGKKSVKLSLNPKNVNRVLSAEALKPGMLLTGTVSSLEDHGYLVDIGVDGTRAFLPLLKAQEYIRQKNKGAKLKVGQYLNCIVEKVKGNGGVVSLSVGHSEVSTAIATEQQSWNLNNLLPGLVVKAQVQKVTPFGLTLNFLTFFTGVVDFMHLDPKKAGTYFSNQAVRACILCVHPRTRVVHLSLRPIFLQPGRPLTRLSCQNLGAVLDDVPVQGFFKKAGATFRLKDGVLAYARLSHLSDSKNVFNPEAFKPGNTHKCRIIDYSQMDELALLSLRTSIIEAQYLRYHDIEPGAVVKGTVLTIKSYGMLVKVGEQMRGLVPPMHLADILMKNPEKKYHIGDEVKCRVLLCDPEAKKLMMTLKKTLIESKLPVITCYADAKPGLQTHGFIIRVKDYGCIVKFYNNVQGLVPKHELSTEYIPDPERVFYTGQVVKVVVLNCEPSKERMLLSFKLSSDPEPKKEPAGHSQKKGKAINIGQLVDVKVLEKTKDGLEVAVLPHNIRAFLPTSHLSDHVANGPLLHHWLQAGDILHRVLCLSQSEGRVLLCRKPALVSTVEGGQDPKNFSEIHPGMLLIGFVKSIKDYGVFIQFPSGLSGLAPKAIMSDKFVTSTSDHFVEGQTVAAKVTNVDEEKQRMLLSLRLSDCGLGDLAITSLLLLNQCLEELQGVRSLMSNRDSVLIQTLAEMTPGMFLDLVVQEVLEDGSVVFSGGPVPDLVLKASRYHRAGQEVESGQKKKVVILNVDLLKLEVHVSLHQDLVNRKARKLRKGSEHQAIVQHLEKSFAIASLVETGHLAAFSLTSHLNDTFRFDSEKLQVGQGVSLTLKTTEPGVTGLLLAVEGPAAKRTMRPTQKDSETVDEDEEVDPALTVGTIKKHTLSIGDMVTGTVKSIKPTHVVVTLEDGIIGCIHASHILDDVPEGTSPTTKLKVGKTVTARVIGGRDMKTFKYLPISHPRFVRTIPELSVRPSELEDGHTALNTHSVSPMEKIKQYQAGQTVTCFLKKYNVVKKWLEVEIAPDIRGRIPLLLTSLSFKVLKHPDKKFRVGQALRATVVGPDSSKTFLCLSLTGPHKLEEGEVAMGRVVKVTPNEGLTVSFPFGKIGTVSIFHMSDSYSETPLEDFVPQKVVRCYILSTADNVLTLSLRSSRTNPETKSKVEDPEINSIQDIKEGQLLRGYVGSIQPHGVFFRLGPSVVGLARYSHVSQHSPSKKALYNKHLPEGKLLTARVLRLNHQKNLVELSFLPGDTGKPDVLSASLEGQLTKQEERKTEAEERDQKGEKKNQKRNEKKNQKGQEEVEMPSKEKQQPQKPQAQKRGGRECRESGSEQERVSKKPKKAGLSEEDDSLVDVYYREGKEEAEETNVLPKEKQTKPAEAPRLQLSSGFAWNVGLDSLTPALPPLAESSDSEEDEKPHQATIKKSKKERELEKQKAEKELSRIEEALMDPGRQPESADDFDRLVLSSPNSSILWLQYMAFHLQATEIEKARAVAERALKTISFREEQEKLNVWVALLNLENMYGSQESLTKVFERAVQYNEPLKVFLHLADIYAKSEKFQEAGELYNRMLKRFRQEKAVWIKYGAFLLRRSQAAASHRVLQRALECLPSKEHVDVIAKFAQLEFQLGDAERAKAIFENTLSTYPKRTDVWSVYIDMTIKHGSQKDVRDIFERVIHLSLAPKRMKFFFKRYLDYEKQHGTEKDVQAVKAKALEYVEAKSSVLED

SEQ ID NO: 1236 - protein, 179 aa, human
MAASAARGAAALRRSINQPVAFVRRIPWTAASSQLKEHFAQFGHVRRCILPFDKETGFHRGLGWVQFSSEMAASAARGAAALRRSINQPVAFVRRIPWTAASSQLKEHFAQFGHVRRCILPFDKETGFHRGLGWVQFSSEEGLRNALQQENHIIDGVKVQVHTRRPKLPQTSDDEKKDF

SEQ ID NO: 1237 - protein, 113 aa, rat
AGTRSSRARATDARGCRLRSQLVPVSALGLGHSSDELIRFRFCSGSCRRARSPHDLSLASLLGAGALRSPPGSRPISQPCCRPTRYEAVSFMDVNSTWRTVDHLSATACGCLG

SEQ ID NO: 1238 - protein, 113 aa, human
AGGPGSRARAAGARGCRLRSQLVPVRALGLGHRSDELVRFRFCSGSCRRARSPHDLSLASLLGAGALRPPPGSRPVSQPCCRPTRYEAVSFMDVNSTWRTVDRLSATACGCLG

SEQ ID NO: 1239 - DNA, 63 bp, artificial sequence
  artificial sequence
ggccagtgaattgtaatacgactcactatagggaggcggtttttttttttttttttttttttt

SEQ ID NO: 1240 - DNA, 78 bp, artificial sequence
  artificial sequence
gctgctcttggctcctccagcacctctgattcacactcacaatgcctgtcacaccgctgcactaggtccttggagggt

SEQ ID NO: 1241 - DNA, 20 bp, artificial sequence
  artificial sequence
gctcctccagcacctctgat

SEQ ID NO: 1242 - DNA, 20 bp, artificial sequence
  artificial sequence
gacctagtgcagcggtgtga

SEQ ID NO: 1243 - protein, 15 aa, artificial sequence
  artificial sequence
CACACTCACAATGCC

SEQ ID NO: 1244 - DNA, 94 bp, artificial sequence
  artificial sequence
cccctcaaattgctttgtttcagaatgcttttgcgcccttgaccgatgccaagactaggagccatgctgatgatgtgggtctcgttctttcttc

SEQ ID NO: 1245 - DNA, 18 bp, artificial sequence
  artificial sequence
tgcttttgcgcccttgac

SEQ ID NO: 1246 - DNA, 21 bp, artificial sequence
  artificial sequence
cgagacccacatcatcagcat

SEQ ID NO: 1247 - DNA, 17 bp, artificial sequence
  artificial sequence
atgccaagactaggagc

SEQ ID NO: 1248 - DNA, 74 bp, Artificial
  Artificial sequence
caaggagggcaacggaactgttatgggtgcagagctccgtcatgtgctggccacgctgggtgagaggctgacag

SEQ ID NO: 1249 - DNA, 21 bp, artificial sequence
  artificial sequence
aacggaactgttatgggtgca

SEQ ID NO: 1250 - DNA, 16 bp, Artificial Sequence
  artificial sequence
ctcacccagcgtggcc

SEQ ID NO: 1251 - DNA, 15 bp, artificial sequence
  artificial sequence
agctccgtcatgtgc

1. A method of identifying a surrogate marker of neuropathic pain in a mammal, comprising:
(a) obtaining a first skin biopsy sample under conditions of neuropathic pain;
(b) obtaining a second skin biopsy sample under conditions of substantially no neuropathic pain;
(c) preparing tissue extracts from the first and the second samples; and
(d) determining an amount of at least one nucleic acid or protein in the tissue extracts;
wherein a difference between the amount of the nucleic acid or the protein in the first sample and the amount of the same nucleic acid or protein in the second sample indicates that the nucleic acid or the protein is a surrogate marker of neuropathic pain.

2. The method of claim 1, wherein the amount of the nucleic acid or the protein in the first sample differs at least 2-fold from the amount of the same nucleic acid or protein in the second sample.

3. The method of claim 1, wherein the first and the second samples are obtained from the same mammal.

4. The method of claim 1, wherein the mammal is a rodent.

5. The method of claim 1, wherein the mammal is a human.

6. The method of claim 1, wherein the nucleic acid or protein is muscle-specific.

7. A method of evaluating the level of neuropathic pain in a mammal, comprising:
(a) obtaining a first skin biopsy sample under conditions of neuropathic pain;
(b) obtaining a second skin biopsy sample under conditions of substantially no neuropathic pain;
(c) preparing tissue extracts from the first and the second samples; and
(d) determining an amount of at least one nucleic acid or protein in the tissues, the nucleic acid or the protein being a surrogate marker of neuropathic pain;
wherein a difference between the amount of the nucleic acid or the protein in the first sample and the amount of the same nucleic acid or protein in the second sample indicates the level of neuropathic pain.

8. The method of claim 7, wherein the amount of the nucleic acid or the protein in the first sample differs at least 2-fold from the amount of the same nucleic acid or protein in the second sample.

9. The method of claim 7, wherein the first and the second samples are obtained from the same mammal.

10. The method of claim 7, wherein the mammal is a rodent.

11. The method of claim 7, wherein the nucleic acid comprises a nonredundant subsequence of any one of the nucleotide sequences of SEQ ID NOs:1-308.

12. The method of claim 7, wherein the nucleic acid comprises a nonredundant subsequence of any one of the nucleotide sequences of SEQ ID NOs:1-42.

13. The method of claim 7, wherein the protein comprises a nonredundant subsequence of any one of amino acid sequences of SEQ ID NOs:309-470.

14. The method of claim 7, wherein the protein comprises a nonredundant subsequence of any one of amino acid sequences of SEQ ID NOs:309-333.

15. The method of claim 7, wherein the mammal is a human.

16. The method of claim 7, wherein the nucleic acid comprises a nonredundant subsequence of any one of the nucleotide sequences of SEQ ID NOs:471-630.

17. The method of claim 7, wherein the nucleic acid comprises a nonredundant subsequence of any one of the nucleotide sequences of SEQ ID NOs:471-493.

18. The method of claim 7, wherein the protein comprises a nonredundant subsequence of any one of amino acid sequences of SEQ ID NOs:631-790.

19. The method of claim 7, wherein the protein comprises a nonredundant subsequence of any one of amino acid sequences of SEQ ID NOs:631-653.

20. The method of claim 7, wherein the surrogate marker is muscle-specific.

21. A method of evaluating the effect of a compound or composition on the level of neuropathic pain in a mammal, comprising:
(a) administering the compound or composition to the mammal having neuropathic pain;
(b) obtaining at least one skin biopsy sample from the mammal;
(c) preparing a tissue extract from the skin biopsy sample; and
(d) determining an amount of at least one nucleic acid or protein in the tissue extract, the nucleic acid or the protein being a surrogate marker of neuropathic pain;
wherein a difference in the amount of the nucleic acid or protein determined in step (d) and the amount of the same nucleic acid or protein expressed in the absence of the compound or composition indicates the level of efficacy of the compound or composition on neuropathic pain.

22. The method of claim 21, wherein the amount determined in step (d) that differs at least 2-fold from the amount of the same nucleic acid or protein expressed in the absence of the compound or composition.

23. The method of claim 21 wherein the compound or composition is a neurotrophic agent.

24. The method of claim 21, wherein the neurotrophic agent belongs to the glial cell-derived neurotrophic factor (GDNF) family.

25. The method of claim 21, wherein the neurotrophic agent is artemin.

26. The method of claim 21, wherein the mammal is a rodent.

27. The method of claim 21, wherein the nucleic acid comprises a nonredundant subsequence of any one of the nucleotide sequences of SEQ ID NOs:791-897.

28. The method of claim 21, wherein the nucleic acid comprises a nonredundant subsequence of any one of the nucleotide sequences of SEQ ID NOs:791-814.

29. The method of claim 21, wherein the protein comprises a nonredundant subsequence of any one of amino acid sequences of SEQ ID NOs:898-962.

30. The method of claim 21, wherein the protein comprises a nonredundant subsequence of any one of amino acid sequences of SEQ ID NOs:898-914.

31. The method of claim 21, wherein the mammal is a human.

32. The method of claim 21, wherein the nucleic acid comprises a nonredundant subsequence of any one of the nucleotide sequences of SEQ ID NOs:963-1038.

33. The method of claim 21, wherein the nucleic acid comprises a nonredundant subsequence of any one of the nucleotide sequences of SEQ ID NOs:963-979.

34. The method of claim 21, wherein the protein comprises a nonredundant subsequence of any one of amino acid sequences of SEQ ID NOs:1039-1114.

35. The method of claim 21, wherein the protein comprises a nonredundant subsequence of any one of amino acid sequences of SEQ ID NOs:1039-1055.

36. The method of claim 21, wherein the nucleic acid or protein is muscle-specific.

37. A method of identifying a biomarker of biological activity of a neurotrophic agent, comprising:
(a) administering the agent to a mammal;
(b) obtaining at least one skin biopsy sample from the mammal;
(c) preparing a tissue extract from the skin biopsy sample; and
(d) determining an amount of at least one nucleic acid or protein in the tissue;
wherein a difference in the amount of the nucleic acid or protein determined in step (d) and the amount of the same nucleic acid or protein expressed in the absence of the agent indicates that the nucleic acid or the protein is a biomarker of in vivo biological activity of the agent.

38. The method of claim 37, wherein the amount determined in step (d) differs at least 2-fold from the amount of the same nucleic acid or protein expressed in the absence of the agent.

39. The method of claim 37, wherein the neurotrophic agent belongs to the glial cell-derived neurotrophic factor (GDNF) family.

40. The method of claim 37, wherein the neurotrophic agent is artemin.

41. The method of claim 37, wherein the nucleic acid or protein is muscle-specific.

42. A method of evaluating in vivo biological activity of a neurotrophic agent, comprising:
(a) administering the agent to a mammal;
(b) obtaining at least one skin biopsy sample from the mammal;
(c) preparing a tissue extract from the skin biopsy sample; and
(d) determining an amount of at least one nucleic acid or protein in the tissue extract;
wherein a difference in the amount of the nucleic acid or protein determined in step (d) and the amount of the same nucleic acid or protein expressed in the absence of the agent indicates that the agent is biologically active.

43. The method of claim 42, wherein the amount determined in step (d) differs at least 2-fold from the amount of the same nucleic acid or protein expressed in the absence of the agent.

44. The method of claim 42, wherein the nucleic acid or the protein is a surrogate marker of neuropathic pain.

45. The method of claim 42, wherein the nucleic acid of the protein is a surrogate marker of neurotrophic activity of the agent.

46. The method of claim 42, wherein the neurotrophic agent belongs to the glial cell-derived neurotrophic factor (GDNF) family.

47. The method of claim 42, wherein the neurotrophic agent is artenin.

48. The method of claim 42, wherein the mammal is a rodent.

49. The method of claim 42, wherein the nucleic acid comprises a nonredundant subsequence of any one of the nucleotide sequences of SEQ ID NOs:1115-1163.

50. The method of claim 42, wherein the nucleic acid comprises a nonredundant subsequence of any one of the nucleotide sequences of SEQ ID NOs:1115-1120.

51. The method of claim 42, wherein the protein comprises a nonredundant subsequence of any one of amino acid sequences of SEQ ID NOs:1164-1178.

52. The method of claim 42, wherein the protein comprises a nonredundant subsequence of any one of amino acid sequences of SEQ ID NOs:1164-1166.

53. The method of claim 42, wherein the mammal is a human.

54. The method of claim 42, wherein the nucleic acid comprises a nonredundant subsequence of any one of the nucleotide sequences of SEQ ID NOs:1179-1207.

55. The method of claim 42, wherein the nucleic acid comprises a nonredundant subsequence of any one of the nucleotide sequences of SEQ ID NOs:1179-1182.

56. The method of claim 42, wherein the protein comprises a nonredundant subsequence of any one of amino acid sequences of SEQ ID NOs:1208-1236.

57. The method of claim 42, wherein the protein comprises a nonredundant subsequence of any one of amino acid sequences of SEQ ID NOs:1208-1211.

58. The method of claim 42, wherein the nucleic acid or protein is muscle-specific.

59. A method of evaluating the effect of artemin on the level of neuropathic pain in a mammal, comprising:
(a) administering artemin to a mammal having neuropathic pain;
(b) obtaining at least one skin biopsy sample from the mammal;
(c) preparing a tissue extract from the skin biopsy sample; and
(d) determining an amount of at least one nucleic acid in the tissue extract, the nucleic acid comprising a nonredundant subsequence of any one of the nucleotide sequences of SEQ ID NOs:791-814;
wherein a difference in the amount of the nucleic acid or protein determined in step (d) and the amount of the same nucleic acid or protein expressed in the absence of the compound or composition indicates the level of efficacy of the compound or composition on neuropathic pain.

60. The method of claim 59, wherein the amount determined in step (d) that differs at least 2-fold from the amount of the same nucleic acid or protein expressed in the absence of artemin.

61. The method of claim 59, wherein the mammal is a rodent.

62. The method of claim 59, wherein neuropathic pain is caused by a spinal nerve injury.

63. The method of claim 62, comprising obtaining a second skin biopsy sample under conditions of substantially no neuropathic pain.

64. The method of claim 63, wherein the first and the second samples are obtained from the same mammal.

65. The method of claim 64, wherein the first skin biopsy sample is obtained from a first site contralateral to the spinal nerve injury, and a second skin biopsy sample is obtained from a second site ipsilateral to the spinal nerve injury.

66. The method of claim 59, wherein the nucleic acid or protein is muscle-specific.
